(19) United States
(12) Patent Application Publication
(10) Pub. No.: US 2024/0384299 A1
(43) Pub. Date: Nov. 21, 2024

(54) TARGETING MOIETIES PROMOTING TRANSDUCTION OF CENTRAL NERVOUS SYSTEM CELLS AND TISSUES AND METHODS OF USE

(71) Applicant: The Broad Institute, Inc., Cambridge, MA (US)

(72) Inventors: Benjamin Deverman, Cambridge, MA (US); Ken Chan, Cambridge, MA (US)

(21) Appl. No.: 18/791,629

(22) Filed: Aug. 1, 2024

Related U.S. Application Data
(63) Continuation of application No. PCT/US2023/061872, filed on Feb. 2, 2023.
(60) Provisional application No. 63/306,009, filed on Feb. 2, 2022.

(51) Int. Cl. C12N 15/86; C07K 14/005

(52) U.S. Cl. CPC C12N 15/86; C07K 14/005; C12N 2750/14122; C12N 2750/14143; C12N 2750/14145

(57) ABSTRACT

An engineered AAV capsid is provided, in which at least one protein on the capsid is modified to include a n-mer motif, which promotes transduction of the capsid into the central nervous system (CNS). Further embodiments provide a vector system comprising one or more vectors encoding AAV capsids and a method of delivering cargo to the CNS. The method comprises administering, in vivo or in vitro, a AAV capsid according to embodiments described herein and the AVV capsid comprises one or more cargo molecules.

### CROSS-REFERENCE TO RELATED APPLICATIONS

[0001] This application is a continuation application of PCT/US2023/061872, filed Feb. 2, 2023, which claims the benefit of priority to U.S. Provisional Patent Application No. 63/306,009, filed on Feb. 2, 2022, the contents of which are incorporated by reference herein in its entirety.

### STATEMENT REGARDING FEDERALLY SPONSORED RESEARCH

[0002] This invention was made with government support under Grant No. NS111689 and Grant No. MH120096 awarded by the National Institutes of Health. The government has certain rights in the invention.

### REFERENCE TO AN ELECTRONIC SEQUENCE LISTING

[0003] This application contains a sequence listing filed in electronic form as an xml file entitled BROD-5520US_ST26.xml, created on Jul. 31, 2024, and having a size of 706,005 bytes. The content of the sequence listing is incorporated herein in its entirety.

### TECHNICAL FIELD

[0004] The subject matter disclosed herein relates generally to enhancing transduction of an engineered AA capsid into the central nervous system (CNS). In particular examples described herein, at least one protein on the capsid is modified to include an n-mer motif. Particular examples relate to a vector system having one or more vectors encoding AAV capsids and a method of delivering cargo to the CNS, in which an AAV capsid according to the examples described herein is administered in vivo or in vitro, and the AAV capsid comprises one or more cargo molecules.

### BACKGROUND

[0005] The development of gene therapies for neurodevelopmental and neurological disorders has been constrained by the inability to efficiently deliver genes throughout the central nervous system (CNS). Several studies have reported engineered AAV9 capsids, such as AAV-PHP.B and related sequences, that are capable of highly effective gene transfer throughout the CNS after intravenous (IV) administration in adult mice. However, these capsids have not shown the same degree of enhanced transduction when tested in other species, including nonhuman primates. As such, there exists a need for capsids that improved transduction in the CNS.

[0006] Citation or identification of any document in this application is not an admission that such a document is available as prior art to the present invention.

### SUMMARY

[0007] In certain example embodiments provided herein, a composition comprises a targeting moiety effective to increase transduction of central nervous system tissues (CNS), optionally further comprising a cargo couple to or otherwise associated with the targeting moiety. In an example embodiment, the targeting moiety comprises a n-mer motif, the n-mer motif is Y₁-Y₂-Y₃-P-Y₄-E-Y₅ wherein Y₁-Y₅ are independently selected amino acids. In an example embodiment, Y₁ or Y₂ is independently selected from an amino acid with a single positive charge, and Y₅ is an amino acid with a single aromatic ring. In an example embodiment, Y₁ is selected from I, T, Q, H, K, R, V, G, E, or L; Y₂ is selected from R, N, A, K, or G; Y₃ is selected from N, I, Q, M, F, L, D, T, R, V, or S; Y₄ is selected from Q, N, V, S, or T; and Y₅ is selected from F, Y, or H.

[0008] In an example embodiment, the n-mer motif is selected from the group consisting of QRIPQEY (SEQ ID NO: 13), KNSPSEF (SEQ ID NO: 10), TRTPVEF (SEQ ID NO: 16), IRVPNEF (SEQ ID NO: 8), IRMPTEF (SEQ ID NO: 6), IRQPQEF (SEQ ID NO: 7), GKLPREF (SEQ ID NO: 4), LALPQEF (SEQ ID NO: 11), ELNPREF (SEQ ID NO: 3), HNFPNEF (SEQ ID NO: 5), TARPNEY (SEQ ID NO: 15), QNIPSEY (SEQ ID NO: 12), and RSQPQEH (SEQ ID NO: 14). In an example embodiment, the n-mer motif is selected from the group consisting of KGPGYEH (SEQ ID NO: 9), QSRDLYR (SEQ ID NO: 20), MNSTISK (SEQ ID NO: 19), VNTVREF (SEQ ID NO: 21), ENHTRDK (SEQ ID NO: 17), and GNDTRST (SEQ ID NO: 18). In an example embodiment, the n-mer motif is selected from the group consisting of IRVPNEF (SEQ ID NO: 8), IRQPQEF (SEQ ID NO: 7), KNSPSEF (SEQ ID NO: 10), QRIPQEY (SEQ ID NO: 13), TRTPVEF (SEQ ID NO: 16), IRMPTEF (SEQ ID NO: 6), RSQPQEH (SEQ ID NO: 14), KGPGYEH (SEQ ID NO: 9) and HNFPNEF (SEQ ID NO: 5).

[0009] In an example embodiment, the n-mer is selected from Table 1 to Table 3. In an example embodiment, the n-mer motif is selected from SEQ ID: 3-21. In an example embodiment, the targeting moiety is part of a viral capsid protein. In an example embodiment, the AAV capsid is selected from SEQ ID: 1, 22-40. In an example embodiment, the n-mer is IRVPNEF (SEQ ID NO: 8).

[0010] In an example embodiment, the n-mer is inserted between two amino acids of the one or more capsid proteins such that the n-mer is external to the AAV capsid. In an example embodiment, the viral capsid protein is an AAV viral capsid protein. In an example embodiment, the n-mer is inserted between amino acids 588 and 589 of a capsid protein of AAV9, or in an analogous position of a capsid protein from AAV1, AAV2, AAV3, AAV4, AAV5, AAV6, AAV7, AAV8, AAVrh8, AAV rh.74, or AAV rh. 10. In an example embodiment, the capsid protein is VP1, VP2, VP3, or a combination thereof.

[0011] In an example embodiment, the cargo is a polynucleotide, one or more polypeptides, a ribonucleoprotein complex. In an example embodiment, the polynucleotide encodes one or more polypeptides and/or a RNAi oligonucleotide. In an example embodiment, the polynucleotide encodes one or more polypeptides. In an example embodiment, the one or more polypeptides comprise enzymes or antibodies. In an example embodiment, the polynucleotide encodes a CRISPR-Cas system.

[0012] In one aspect, provided herein is a composition comprising one or more nucleic acid vectors (including a plasmid or other construct) encoding a targeting moiety effective to increase transduction of central nervous system tissues. (CNS). Also provided are viral vectors, such as recombinant AAV (rAAV) particles having capsids comprising the targeting moiety described herein and also comprising a nucleic acid encoding a payload. Also included are embodiments where the targeting moiety is coupled directly to a payload independent of that payload's incorporation into a rAAV. In an example embodiment, provided herein are vectors wherein the targeting moiety comprises a n-mer motif, the n-mer motif is Y₁-Y₂-Y₃-P-Y₄-E-Y₅ wherein Y₁-Y₅ are independently selected amino acids. In an example embodiment, provided herein are vectors wherein Y₁ or Y₂ is independently selected from an amino acid with a single positive charge, and Y₅ is an amino acid with a single aromatic ring. In an example embodiment, provided herein are vectors wherein Y₁ is selected from I, T, Q, H, K, R, V, G, E, or L; Y₂ is selected from R, N, A, K, or G; Y₃ is selected from N, I, Q, M, F, L, D, T, R, V, or S; Y₄ is selected from Q, N, V, S, or T; and Y₅ is selected from F, Y, or H.

[0013] In an example embodiment, provided herein are vectors wherein the n-mer motif is selected from the group consisting of QRIPQEY (SEQ ID NO: 13), KNSPSEF (SEQ ID NO: 10), TRTPVEF (SEQ ID NO: 16), IRVPNEF (SEQ ID NO: 8), IRMPTEF (SEQ ID NO: 6), IRQPQEF (SEQ ID NO: 7), GKLPREF (SEQ ID NO: 4), LALPQEF (SEQ ID NO: 11), ELNPREF (SEQ ID NO: 3), HNFPNEF (SEQ ID NO: 5), TARPNEY (SEQ ID NO: 15), QNIPSEY (SEQ ID NO: 12), and RSQPQEH (SEQ ID NO: 14). In an example embodiment, provided herein are vectors wherein the n-mer motif is selected from the group consisting of KGPGYEH (SEQ ID NO: 9), QSRDLYR (SEQ ID NO: 20), MNSTISK (SEQ ID NO: 19), VNTVREF (SEQ ID NO: 21), ENHTRDK (SEQ ID NO: 17), and GNDTRST (SEQ ID NO: 18). In an example embodiment, provided herein are vectors wherein the n-mer motif is selected from the group consisting of IRVPNEF (SEQ ID NO: 8), IRQPQEF (SEQ ID NO: 7), KNSPSEF (SEQ ID NO: 10), QRIPQEY (SEQ ID NO: 13), TRTPVEF (SEQ ID NO: 16), IRMPTEF (SEQ ID NO: 6), RSQPQEH (SEQ ID NO: 14), KGPGYEH (SEQ ID NO: 9) and HNFPNEF (SEQ ID NO: 5).

[0014] In an example embodiment, provided herein are vectors wherein the n-mer is selected from Table 1 to Table 3. In an example embodiment, provided herein are vectors wherein the n-mer motif is selected from SEQ ID: 3-21. In an example embodiment, provided herein are vectors wherein the targeting moiety is part of a viral capsid protein. In an example embodiment, provided herein are vectors wherein the AAV capsid comprises capsid proteins having an amino acid sequence selected from SEQ ID: 1, 22-40. In an example embodiment, provided herein are vectors wherein the n-mer is IRVPNEF (SEQ ID NO: 8).

[0015] In an example embodiment, provided herein are vectors wherein the n-mer is inserted between two amino acids of the one or more capsid proteins such that when the modified capsid proteins are assembled into an AAV capsid, the n-mer is external to the AAV capsid. In an example embodiment, provided herein are vectors wherein the viral capsid protein is an AAV viral capsid protein. In an example embodiment, provided herein are vectors wherein the n-mer is inserted between amino acids 588 and 589 of a capsid protein of AAV9, or in an analogous position of a capsid protein from AAV1, AAV2, AAV3, AAV4, AAV5, AAV6, AAV7, AAV8, AAVrh8, AAV rh.74, or AAV rh. 10. In an example embodiment, provided herein are vectors wherein the capsid protein is VP1, VP2, VP3, or a combination thereof.

[0016] In an example embodiment, provided herein are viral vectors wherein the cargo is a polynucleotide, one or more polypeptides, a ribonucleoprotein complex. In an example embodiment, provided herein are vectors wherein the polynucleotide encodes one or more polypeptides and/or a RNAi oligonucleotide. In an example embodiment, provided herein are vectors wherein the polynucleotide encodes one or more polypeptides. In an example embodiment, provided herein are vectors wherein the one or more polypeptides comprise enzymes or antibodies. In an example embodiment, the polynucleotide encodes a CRISPR-Cas system.

[0017] In one aspect, provided herein is a composition comprising a polypeptide encoded or produced by the vector systems described herein. In one aspect, provided herein is a composition comprising a particle produced by the vector systems described herein. In one aspect, provided herein is a composition comprising a cell comprising the composition, vector, polypeptide, or particle described herein.

[0018] In one aspect, provided herein is a method of delivering one or more cargos to the CNS, comprising: administering, in vivo or in vitro, the engineered AAV capsid as described herein, or the vector as described herein. In an example embodiment, provided herein a method of delivery wherein the cargo is a polynucleotide encoding a RNAi oligonucleotide, a polynucleotide encoding a polypeptide, or a polypeptide. In an example embodiment, provided herein a method of delivery wherein the cargo polynucleotide encodes a polypeptide, including an enzyme or antibody. In an example embodiment, provided herein a method of delivery wherein the cargo is a nucleic acid encoding a Cas polypeptide, a guide molecule, or both. In an example embodiment, provided herein a method of delivery wherein the cargo is a nucleic acid encoding a nuclease or a nucleic acid component of an RNA-guided nuclease. In an example embodiment, provided herein a method of delivery wherein the cargo is one or more polynucleotides encoding the nuclease and nucleic acid component of an RNA-guided nuclease.

[0019] These and other aspects, objects, features, and advantages of the example embodiments will become apparent to those having ordinary skill in the art upon consideration of the following detailed description of example embodiments.

### BRIEF DESCRIPTION OF THE DRAWINGS

[0020] An understanding of the features and advantages of the present invention will be obtained by reference to the following detailed description that sets forth illustrative embodiments, in which the principles of the invention may be utilized, and the accompanying drawings of which:

[0021] FIG. 1—Enrichment of AAV capsid sequences containing the [RK] 1/2-XPXE [FYH] motif in the marmoset brain and C57BL/6J and BALB/cJ brain and liver. The heatmap shows the enrichment of assessed by NGS sequencing of the capsid mRNAs in the indicated tissue samples from the third round of selection. Enrichment is defined as the Log2 (capsid variant RPM in the indicated tissue sample/RPM in the virus library). 10 replicates with unique nucleotide sequences encoding the 7-mer are shown.

[0022] FIG. 2—Enrichment of additional AAV capsid sequences in the marmoset brain, and C57BL/6J and BALB/cJ brain and liver. The heatmap shows the enrichment assessed by NGS sequencing of the capsid mRNAs in the indicated tissue samples from the third round of selection. Enrichment is defined as the Log2 (capsid variant RPM in the indicated tissue sample/RPM in the virus library). 10 replicates with unique nucleotide sequences encoding the 7-mer are shown.

[0023] FIG. 3A-3B—Titers and protein purity assessments of individual AAV batches. A) Nuclease resistant vg/L in cell pellets prepared from HEK293 suspension cell cultures. B) SyproRuby stained SDS-PAGE gel. 1E10 vg/lane was loaded.

[0024] FIG. 4A-4B—AAV BI103 is more effective than AAV9 at gene delivery throughout the marmoset brain after intravenous administration. AAV9: CAG-NLS-GFP-3×-miR122-WPRE-pA and AAV BI103: CAG-NLS-mScarlet-3x-miR122-WPRE-pA were co-administered in an adult marmoset at 4E13 per virus (8E13 total AAV dose). Brain expression was assessed 3 weeks later. A) Image shows mScarlet expression (magenta) and GFP expression (green) in a sagittal section of the marmoset brain. B) The images separately show expression of mScarlet expression in sagittal sections taken from the marmoset brain. The sections show progress from medial to lateral sections (left to right). GFP expression from the same sections is shown in the bottom set of panels.

[0025] FIG. 5A-5F—AAV-BI103 more efficiently transduces cells in the marmoset brain. AAV9: CAG-NLS-GFP-3×-miR 122-WPRE-pA and BI103: CAG-NLS-mScarlet-3×-miR122-WPRE-pA were co-administered to an adult marmoset at 4×1013 vg/kg per AAV and express was assessed 3 weeks later. A) The percentage of total cells (DAPI+) that express GFP delivered by AAV9 or mScarlet delivered by BI103. B) The percentage of NeuN+ neurons that express GFP delivered by AAV9 or mScarlet delivered by BI103. C-F) Individual data points represent data from different images. N=1 marmoset. Images show GFP and mScarlet transduction together with anti-NeuN immunostaining and DNA labeling using DAPI in the cerebral cortex (C), Thalamus (D), Striatum (E), and Cerebellum (F). Cells were counted using Cellprofiler. Individual data points represent data from different images. N=1 animal.

[0026] FIG. 6—AAV BI-103 transduces cells in the marmoset spinal cord after intravenous administration. AAV9: CAG-NLS-GFP-3×-miR122-WPRE-pA and AAV BI-103: CAG-NLS-mScarlet-3×-miR122-WPRE-pA were co-administered in an adult marmoset at 4E13 per virus (8E13 total AAV dose). Spinal cord expression was assessed 3 weeks later.

[0027] FIG. 7—Intravenous delivery of BI103 resulted in detectable liver hepatocyte transduction from a vector designed to reduce hepatocyte expression. AAV9: CAG-NLS-GFP-3×-miR122-WPRE-pA and AAV BI-103: CAG-NLS-mScarlet-3×-miR122-WPRE-pA were co-administered in an adult marmoset at 4E13 per virus (8E13 total AAV dose). (The miR122 target sequences were included within the 3′UTR of both transgene cassettes to reduce expression in liver, which expresses high levels of miR122. (B) mScarlet fluorescence is weakly detectable in the marmoset liver after co-administration of AAV9 and AAV-BI103.

[0028] FIG. 8—BI103 outperformed AAV9 when administered intravenously to an adult marmoset. AAV9: CAG-NLS-GFP-3×-miR122-BS and BI103: CAG-NLS-mScarlet-3×-miR122-BS were intravenously administered to an adult marmoset at 4×1013 vg/kg and reporter expression was assessed after 21 days.

[0029] FIG. 9—BI103 outperformed AAV9 when administered intravenously to an adult marmoset. High magnification images of transgene expression from AAV BI-103 and AAV9

[0030] FIG. 10—Logo analysis for P×EF motif found in capsids recovered after round 2 and round 3 in vivo selection in the marmoset brain.

[0031] The figures herein are for illustrative purposes only and are not necessarily drawn to scale.

### DETAILED DESCRIPTION OF THE EXAMPLE EMBODIMENTS

### General Definitions

[0032] Unless defined otherwise, technical and scientific terms used herein have the same meaning as commonly understood by one of ordinary skill in the art to which this disclosure pertains. Definitions of common terms and techniques in molecular biology may be found in Molecular Cloning: A Laboratory Manual, 2^{nd} edition (1989) (Sambrook, Fritsch, and Maniatis); Molecular Cloning: A Laboratory Manual, 4^{th} edition (2012) (Green and Sambrook); Current Protocols in Molecular Biology (1987) (F. M. Ausubel et al. eds.); the series Methods in Enzymology (Academic Press, Inc.): PCR 2: A Practical Approach (1995) (M. J. MacPherson, B. D. Hames, and G. R. Taylor eds.): Antibodies, A Laboratory Manual (1988) (Harlow and Lane, eds.): Antibodies A Laboratory Manual, 2nd edition 2013 (E. A. Greenfield ed.); Animal Cell Culture (1987) (R. I. Freshney, ed.); Benjamin Lewin, Genes IX, published by Jones and Bartlet, 2008 (ISBN 0763752223); Kendrew et al. (eds.), The Encyclopedia of Molecular Biology, published by Blackwell Science Ltd., 1994 (ISBN 0632021829); Robert A. Meyers (ed.), Molecular Biology and Biotechnology: a Comprehensive Desk Reference, published by VCH Publishers, Inc., 1995 (ISBN 9780471185710); Singleton et al., Dictionary of Microbiology and Molecular Biology 2nd ed., J. Wiley & Sons (New York, N.Y. 1994), March, Advanced Organic Chemistry Reactions, Mechanisms and Structure 4th ed., John Wiley & Sons (New York, N.Y. 1992); and Marten H. Hofker and Jan van Deursen, Transgenic Mouse Methods and Protocols, 2nd edition (2011).

[0033] As used herein, the singular forms “a”, “an”, and “the” include both singular and plural referents unless the context clearly dictates otherwise.

[0034] The term “optional” or “optionally” means that the subsequent described event, circumstance or substituent may or may not occur, and that the description includes instances where the event or circumstance occurs and instances where it does not.

[0035] The recitation of numerical ranges by endpoints includes all numbers and fractions subsumed within the respective ranges, as well as the recited endpoints.

[0036] The terms “about” or “approximately” as used herein when referring to a measurable value such as a parameter, an amount, a temporal duration, and the like, are meant to encompass variations of and from the specified value, such as variations of +/−10% or less, +/−5% or less, +/−1% or less, and +/−0.1% or less of and from the specified value, insofar such variations are appropriate to perform in the disclosed invention. It is to be understood that the value to which the modifier “about” or “approximately” refers is itself also specifically, and preferably, disclosed.

[0037] As used herein, a “biological sample” may contain whole cells and/or live cells and/or cell debris. The biological sample may contain (or be derived from) a “bodily fluid”. The present invention encompasses embodiments wherein the bodily fluid is selected from amniotic fluid, aqueous humour, vitreous humour, bile, blood serum, breast milk, cerebrospinal fluid, cerumen (earwax), chyle, chyme, endolymph, perilymph, exudates, feces, female ejaculate, gastric acid, gastric juice, lymph, mucus (including nasal drainage and phlegm), pericardial fluid, peritoneal fluid, pleural fluid, pus, rheum, saliva, sebum (skin oil), semen, sputum, synovial fluid, sweat, tears, urine, vaginal secretion, vomit and mixtures of one or more thereof. Biological samples include cell cultures, bodily fluids, cell cultures from bodily fluids. Bodily fluids may be obtained from a mammal organism, for example by puncture, or other collecting or sampling procedures.

[0038] The terms “subject,” “individual,” and “patient” are used interchangeably herein to refer to a vertebrate, preferably a mammal, more preferably a human. Mammals include, but are not limited to, murines, simians, humans, farm animals, sport animals, and pets. Tissues, cells and their progeny of a biological entity obtained in vivo or cultured in vitro are also encompassed.

[0039] Various embodiments are described hereinafter. It should be noted that the specific embodiments are not intended as an exhaustive description or as a limitation to the broader aspects discussed herein. One aspect described in conjunction with a particular embodiment is not necessarily limited to that embodiment and can be practiced with any other embodiment(s). Reference throughout this specification to “one embodiment”, “an embodiment,” “an example embodiment,” means that a particular feature, structure or characteristic described in connection with the embodiment is included in at least one embodiment of the present invention. Thus, appearances of the phrases “in one embodiment,” “in an embodiment,” or “an example embodiment” in various places throughout this specification are not necessarily all referring to the same embodiment, but may. Furthermore, the particular features, structures or characteristics may be combined in any suitable manner, as would be apparent to a person skilled in the art from this disclosure, in one or more embodiments. Furthermore, while some embodiments described herein include some but not other features included in other embodiments, combinations of features of different embodiments are meant to be within the scope of the invention. For example, in the appended claims, any of the claimed embodiments can be used in any combination.

[0040] All publications, published patent documents, and patent applications cited herein are hereby incorporated by reference to the same extent as though each individual publication, published patent document, or patent application was specifically and individually indicated as being incorporated by reference.

### Overview

[0041] Embodiments disclosed herein provide targeting moieties which promote transduction into the CNS. These targeting moieties may be incorporated into particles, such as viral capsid delivery particles, to confer tropism on the delivery particles and promote transduction of CNS. Example CNS tissue include brain and spinal cord tissue. Example CNS cell types include neurons and glial cells. Further embodiments disclosed herein provide a vector system comprising one or more vectors encoding AAV capsids for use in generating rAAV particles according to embodiments described herein as well as vectors encoding cargo molecules such as polypeptides and polynucleotides for delivery via the rAVV particles. Accordingly, embodiments disclosed herein provide compositions capable of delivering cargos with enhanced selectivity and efficiency to the CNS vasculature. Embodiments disclosed herein also provide vector systems for the generation and loading of such delivery particles with a cargo. Likewise, embodiments disclosed herein provide methods for use of such compositions to target CNS endothelial cells, in vitro and in vivo, with implications for both therapeutic and research purposes.

[0042] Additional feature and advantages of the aforementioned embodiments are further described below.

### Targeting Moieties and Compositions Thereof

[0043] In example embodiments, compositions are provided herein comprising a targeting moiety with an enhanced tropism for endothelial cells of the CNS. This targeting moiety may be coupled directly to a cargo to be delivered such as an oligonucleotide or polypeptide. Alternatively, the targeting molecule may be incorporated into a delivery particle to confer tropism for endothelial cells of the CNS on the delivery particle. A non-limiting example of delivery particle is a viral capsid particle. In such embodiments, the targeting moiety may be incorporated into a viral capsid polypeptide such that the targeting moiety is incorporated into the assembled viral capsid. However, other particle delivery systems where the targeting moiety may be incorporated or attached, for example on exosomes or liposomes, are also envisioned and encompassed as alternative embodiments herein.

[0044] The targeting moiety may comprise a n-mer motif. The n-mer motif may comprise Y₁ -Y₂-Y₃-P-Y₄-E-Y₅ wherein Y₁-Y₅ are independently selected amino acids. Y₁-Y₅ may comprise any combination of alanine (ala; A), arginine (arg; R), asparagine (asn; N), aspartic acid (asp; D), cysteine (cys; C), glutamine (gln; Q), glutamic acid (glu; E), glycine (gly; G), histidine (his; H), isoleucine (ile; I); leucine (leu; L); lysine (lys; K), methionine (met; M), phenylalanine (phe; F), proline (pro; P), serine (ser; S); threonine (thr; T), tryptophan (trp; W), tyrosine (tyr; Y); valine (val; V) or artificial amino acids. It should be understood that any reference to any amino acid is intended to encompass any natural amino acid as well as any amino acid mimetic having similar physical and chemical characteristics to naturally occurring amino acids. In an example embodiment, Y₁ or Y₂ is independently selected from an amino acid with a single positive charge, and Y₅ is an amino acid with a single aromatic ring. Positively charged amino acids may comprise R, H, and K. Amino acids with a single aromatic ring may comprise F, W, and Y.

[0045] In example embodiments, Y₁ is selected from I, T, Q, H, K, R, V, G, E, or L; Y₂ is selected from R, N, A, K, or G; Y₃ is selected from N, I, Q, M, F, L, D, T, R, V, or S; Y₄ is selected from Q, N, V, S, or T; and Y₅ is selected from F, Y, or H. In a preferred embodiment, the n-mer motif is selected from the group consisting of QRIPQEY (SEQ ID NO: 13), KNSPSEF (SEQ ID NO: 10), TRTPVEF (SEQ ID NO: 16), IRVPNEF (SEQ ID NO: 8), IRMPTEF (SEQ ID NO: 6), IRQPQEF (SEQ ID NO: 7), GKLPREF (SEQ ID NO: 4), LALPQEF (SEQ ID NO: 11), ELNPREF (SEQ ID NO: 3), HNFPNEF (SEQ ID NO: 5), TARPNEY (SEQ ID NO: 15), QNIPSEY (SEQ ID NO: 12), RSQPQEH (SEQ ID NO: 14), KGPGYEH (SEQ ID NO: 9), QSRDLYR (SEQ ID NO: 20), MNSTISK (SEQ ID NO: 19), VNTVREF (SEQ ID NO: 21), ENHTRDK (SEQ ID NO: 17), and GNDTRST (SEQ ID NO: 18). In a preferred embodiment, the n-mer motif is selected from the group consisting of IRVPNEF (SEQ ID NO: 8), IRQPQEF (SEQ ID NO: 7), KNSPSEF (SEQ ID NO: 10), QRIPQEY (SEQ ID NO: 13), TRTPVEF (SEQ ID NO: 16), IRMPTEF (SEQ ID NO: 6), RSQPQEH (SEQ ID NO: 14), KGPGYEH (SEQ ID NO: 9) and HNFPNEF (SEQ ID NO: 5). In a preferred embodiment, the n-mer is IRVPNEF (SEQ ID NO: 8).

[0046] In an example embodiment, the n-mer is selected from Table 1 to Table 3. In an example embodiment, the n-mer is selected from SEQ ID: 3-21.

[0047] In example embodiments, the n-mer can be used to increase transduction in target cells i.e. CNS cells and tissues. The increase in transduction efficiency of the n-mer to a cell may be compared to a composition that does not contain the targeting moiety for example inclusion of one or more targeting moieties in a composition can result in an increase in transduction and or transduction efficiency by 10%, 20%, 30%, 40%, 50%, 60%, 70%, 80%, 90%, 100% or more. In an exemplary embodiment the increase in transduction and or transduction efficiency is one and a half fold, two-fold, three-fold, four-fold, five-fold, six-fold, seven-fold, eight-fold, nine-fold, ten-fold, 20-fold, 30-fold, 40-fold, 50-fold, 60-fold, 70-fold, 80-fold or more relative to a composition lacking the n-mer. In one embodiment, the transduction and/or transduction efficiency is increased or enhanced in endothelial cells, in one embodiment increase in endothelial cells of the vasculature, for example, the central nervous system vasculature. In embodiments, the transduction and/or transduction efficiency is increased or enhanced in cells of the central nervous system. In embodiments, the transduction and/or transduction efficiency is increased or enhanced in neurons and glial cells. In an embodiment, the composition comprising a n-mer is selective to a target cell as compared to other cell types and/or other virus particles. As used herein, ‘selective’ and ‘cell-selective’ refers to preferential targeting for cells as compared to other cell types. Preferably, the targeting moiety is selective for a desired target (e.g. cell, organ, system e.g. large diameter arteries and veins, brain, retina and spinal cord microvasculature, species) or set of targets by at least 2:1, 3:1, 4:1, 5:1, 6:1 7:1, 8:1, 9:1, 10:1 or more; or 10%, 20%, 30%, 40%, 50%, 60%, 70%, 75% 80%, 85%, 90% or more, relative to other targets or cells (e.g., microvasculature of peripheral organs such as the kidney). In an example embodiment, the composition comprising a targeting moiety described herein can have an increased uptake, delivery rate, transduction rate, efficiency, amount, or a combination thereof in a target cell (e.g., endothelial cells across the arterio-venous axis in brain, retina, and spinal cord vasculature) as compared to other cells types (e.g., muscle cells) and/or other virus particles (e.g., AAVs not containing the targeting moiety) and other compositions that do not contain the cell-selective n-mer motif of the present invention.

### Engineered Viral Capsids

[0048] Described herein are various embodiments of engineered viral capsids, such as adeno-associated virus (AAV) capsids, that can be engineered to confer cell-selective tropism, such as CNS tissue- and cell-specific tropism, to an engineered viral particle. Engineered viral capsids can be lentiviral, retroviral, adenoviral, or AAV capsids. The engineered capsids can be included in an engineered virus particle (e.g., an engineered lentiviral, retroviral, adenoviral, or AAV virus particle), and can confer cell-selective tropism to the engineered viral particle. The engineered viral capsids described herein can include one or more engineered viral capsid proteins described herein. The engineered viral capsids described herein can include one or more engineered viral capsid proteins described herein that can contain one or more target moiety as described elsewhere herein.

[0049] The engineered viral capsids can be variants of wild-type viral capsid. For example, in some embodiments, the engineered AAV capsids can be variants of wild-type AAV capsids. In some embodiments, the wild-type AAV capsids can be composed of VP1, VP2, VP3 capsid proteins or a combination thereof. In other words, the engineered AAV capsids can include one or more variants of a wild-type VP1, wild-type VP2, and/or wild-type VP3 capsid proteins. In some embodiments, the serotype of the reference wild-type AAV capsid can be AAV-1, AAV-2, AAV-3, AAV-4, AAV-5, AAV-6, AAV-8, AAV-9 or any combination thereof. In some embodiments, the serotype of the wild-type AAV capsid can be AAV-9. The engineered AAV capsids can have a different tropism than that of the reference wild-type AAV capsid.

[0050] In some embodiments, the target moiety is incorporated into a viral protein, such as a capsid protein, including but not limited to lentiviral, adenoviral, AAV, bacteriophage, retroviral proteins. In some embodiments, the target moiety is located between two amino acids of the viral protein such that the target moiety is external (i.e., is presented on the surface of) to a viral capsid. In an example embodiment, the target moiety disclosed herein can be inserted between two amino acids in the wild-type viral protein (VP) (or capsid protein). In some embodiments, the target moiety can be inserted between two amino acids in a variable amino acid region in a viral capsid protein.

[0051] In some embodiments, the target moiety can be inserted between two amino acids in a variable amino acid region in an AAV capsid protein. The core of each wild-type AAV viral protein contains an eight-stranded beta-barrel motif (betaB to betaI) and an alpha-helix (alphaA) that are conserved in autonomous parvovirus capsids (see e.g., DiMattia et al. 2012. J. Virol. 86 (12): 6947-6958). Structural variable regions (VRs) occur in the surface loops that connect the beta-strands, which cluster to produce local variations in the capsid surface. AAVs have 12 variable regions (also referred to as hypervariable regions) (see e.g., Weitzman and Linden. 2011. “Adeno-Associated Virus Biology.” In Snyder, R. O., Moullier, P. (eds.) Totowa, NJ: Humana Press). In one example embodiment, one or more target moiety can be inserted between two amino acids in one or more of the 12 variable regions in the wild-type AVV capsid proteins. In one example embodiment, the one or more target moieties can be each be inserted between two amino acids in VR-I, VR-II, VR-III, VR-IV, VR-V, VR-VI, VR-VII, VR-III, VR-IX, VR-X, VR-XI, VR-XII, or a combination thereof. In one example embodiment, the engineered capsid is a modified AAV1 capsid and can have a target moiety motif inserted after or a neighbor of amino acid 590, e.g., between amino acid 590 and 591 (SEQ ID NO: 1). In one example embodiment, the engineered capsid is a modified AAV3 capsid and can have a target moiety motif inserted after or a neighbor of amino acid 586, e.g., between amino acid 586 and 587. In one example embodiment, the engineered capsid is a modified AAV4 capsid and can have a target moiety motif inserted after or a neighbor of amino acid 586. In one example embodiment, the engineered capsid is a modified AAV5 capsid and can have a target moiety motif inserted after or a neighbor of amino acid 575. In one example embodiment, the engineered capsid is a modified AAV6 capsid and can have a target moiety inserted at or a neighbor of amino acid 585 and optionally immediately after one of positions Y705-731, T492V, K531E. In one example embodiment, the engineered capsid is a modified AAV8 capsid and can have a target moiety inserted after or a neighbor of amino acid 585 and 590. In one example embodiment, the engineered capsid is a modified AAV9 capsid and can have a target moiety inserted after or a neighbor of amino acid 588 and 589 or between amino acid 588 and 589. (Büning, H.; Srivastava, A. Capsid Modifications for Targeting and Improving the Efficacy of AAV Vectors. Molecular Therapy—Methods & Clinical Development 2019, 12, 248-265). In one example embodiment, the engineered capsid can have a 7-mer peptide inserted between amino acids 588 and 589 of an AAV9 viral protein. SEQ ID NO: 1 is a reference AAV9 capsid sequence for at least referencing the insertion sites discussed above. It will be appreciated that target moieties can be inserted in analogous positions in AAV viral proteins of other serotypes, such as but not limited to, AAV1, AAV2, AAV3, AAV4, AAV5, AAV6, AAV7, AAV8, AAV9, AAV rh.74, AAV rh.10 capsid polypeptide. In some embodiments as previously discussed, the target moiety(s) can be inserted between any two contiguous amino acids within the AAV viral protein and in some embodiments the insertion is made in a variable region.

[0052] In one example embodiment, the first 1, 2, 3, or 4 amino acids of a target moiety can replace 1, 2, 3, or 4 amino acids of a polypeptide into which it is inserted and preceding the insertion site. Using an AAV as another non-limiting example, one or more of the target moieties can be inserted into e.g., an AAV9 capsid polypeptide between amino acids 588 and 589 and the insert can replace amino acids 586, 587, and 588 such that the amino acid immediately preceding the target moiety after insertion is residue 585. It will be appreciated that this principle can apply in any other insertion context and is not necessarily limited to insertion between residues 588 and 589 of an AAV9 capsid or equivalent position in another AAV capsid. It will further be appreciated that in some embodiments, no amino acids in the polypeptide into which the target moiety is inserted are replaced by the target moiety. In an example embodiment, the AAV capsid is selected from SEQ ID: 1, 22-40.

[0053] In some embodiments, in addition to the n-mer motif(s) the targeting moiety can include a polypeptide, a polynucleotide, a lipid, a polymer, a sugar, or a combination thereof.

[0054] The engineered viral capsid and/or capsid proteins can be encoded by one or more engineered viral capsid polynucleotides. In some embodiments, the engineered viral capsid polynucleotide is an engineered AAV capsid polynucleotide, engineered lentiviral capsid polynucleotide, engineered retroviral capsid polynucleotide, or engineered adenovirus capsid polynucleotide. In some embodiments, an engineered viral capsid polynucleotide (e.g, an engineered AAV capsid polynucleotide, engineered lentiviral capsid polynucleotide, engineered retroviral capsid polynucleotide, or engineered adenovirus capsid polynucleotide) can include a 3′ polyadenylation signal. The polyadenylation signal can be an SV40 polyadenylation signal.

[0055] In some embodiments, the engineered polynucleotide can be included in a polynucleotide that is configured to be a viral genome donor in a viral vector system that can be used to generate engineered viral particles described elsewhere herein.

[0056] In some embodiments, the engineered AAV capsid encoding polynucleotide can be included in a polynucleotide that is configured to be an AAV genome donor in an AAV vector system that can be used to generate engineered AAV particles described elsewhere herein. In some embodiments, the engineered AAV capsid encoding polynucleotide can be operably coupled to a poly adenylation tail. In some embodiments, the poly adenylation tail can be an SV40 poly adenylation tail. In some embodiments, the AAV capsid encoding polynucleotide can be operably coupled to a promoter. The promoter may be selected based on the cell-based system used for production of the AAV capsid and optimized for expression in that particular host cell system. Delivery of vectors encoding the AAV capsid in vivo for in vivo production of rAAVs is also contemplated In some embodiments, the promoter can be a tissue specific promoter depending on the cell-type targeted for in vivo AAV production. In some embodiments, the tissue specific promoter is specific for muscle (e.g., cardiac, skeletal, and/or smooth muscle), neurons and supporting cells (e.g., astrocytes, glial cells, Schwann cells, etc.), fat, spleen, liver, kidney, immune cells, spinal fluid cells, synovial fluid cells, skin cells, cartilage, tendons, connective tissue, bone, pancreas, adrenal gland, blood cell, bone marrow cells, placenta, endothelial cells, and combinations thereof. In some embodiments, the promoter can be a constitutive promoter. Suitable tissue specific promoters and constitutive promoters are discussed elsewhere herein and are generally known in the art and can be commercially available. Suitable neuronal tissue/cell specific promoters include, but are not limited to, GFAP promoter (astrocytes), SYN1 promoter (neurons), and NSE/RU5′ (mature neurons).

### Further Capsid Modifications

[0057] In one example embodiment, the viral capsid protein may comprise one or more mutations relative to wild type. In an example embodiment, the one or more mutations comprise a K449R substitution in a capsid polypeptide of AAV 9, or a substitution in an analogous position of a capsid polypeptide from AAV1, AAV2, AAV3, AAV4, AAV5, AAV6, AAV7, AAV8, AAVrh8, AAV rh.74, or AAV rh. 10.

### Engineered Vectors and Vector Systems

[0058] Also provided herein are vectors and vector systems that can contain one or more of the engineered polynucleotides described herein that can encode one or more of the target moiety of the present invention, including but not limited to engineered viral polynucleotides (e.g., engineered AAV polynucleotides). As used in this context, engineered viral capsid polynucleotides refers to any one or more of the polynucleotides described herein capable of encoding an engineered viral capsid as described elsewhere herein and/or polynucleotide(s) capable of encoding one or more engineered viral capsid proteins described elsewhere herein. Further, where the vector includes an engineered viral capsid polynucleotide described herein, the vector can also be referred to and considered an engineered vector or system thereof although not specifically noted as such. In embodiments, the vector can contain one or more polynucleotides encoding one or more elements of an engineered viral capsid described herein. The vectors and systems thereof can be useful in producing bacterial, fungal, yeast, plant cells, animal cells, and transgenic animals that can express one or more components of the engineered viral capsid, particle, or other compositions described herein. Within the scope of this disclosure are vectors containing one or more of the polynucleotide sequences described herein. One or more of the polynucleotides that are part of the engineered viral capsid and system thereof described herein can be included in a vector or vector system.

[0059] In some embodiments, the vector can include an engineered viral (e.g., AAV) capsid polynucleotide having a 3′ polyadenylation signal. In some embodiments, the 3′ polyadenylation is an SV40 polyadenylation signal. In some embodiments the vector does not have splice regulatory elements. In some embodiments, the vector includes one or more minimal splice regulatory elements. In some embodiments, the vector can further include a modified splice regulatory element, wherein the modification inactivates the splice regulatory element. In some embodiments, the modified splice regulatory element is a polynucleotide sequence sufficient to induce splicing, between a rep protein polynucleotide and the engineered viral (e.g., AAV) capsid protein variant polynucleotide. In some embodiments, the polynucleotide sequence can be sufficient to induce splicing is a splice acceptor or a splice donor. In some embodiments, the viral (e.g., AAV) capsid polynucleotide is an engineered viral (e.g., AAV) capsid polynucleotide as described elsewhere herein. It some embodiments, the vector does not include one or more minimal splice regulatory elements, modified splice regulatory agent, splice acceptor, and/or splice donor.

[0060] The vectors and/or vector systems can be used, for example, to express one or more of the engineered viral (e.g., AAV) capsid and/or other polynucleotides in a cell, such as a producer cell, to produce engineered viral (e.g., AAV) particles and/or other compositions (e.g., polypeptides, particles, etc.) containing an engineered viral (e.g., AAV) capsid or other composition containing an n-mer motif of the present invention described elsewhere herein. Other uses for the vectors and vector systems described herein are also within the scope of this disclosure. In general, and throughout this specification, the term “vector” is a tool that allows or facilitates the transfer of an entity from one environment to another. In some contexts which will be appreciated by those of ordinary skill in the art, “vector” can be a term of art to refer to a nucleic acid molecule capable of transporting another nucleic acid to which it has been linked. A vector can be a replicon, such as a plasmid, phage, or cosmid, into which another DNA segment may be inserted so as to bring about the replication of the inserted segment. Generally, a vector is capable of replication when associated with the proper control elements.

[0061] Vectors include, but are not limited to, nucleic acid molecules that are single-stranded, double-stranded, or partially double-stranded; nucleic acid molecules that comprise one or more free ends, no free ends (e.g., circular); nucleic acid molecules that comprise DNA, RNA, or both; and other varieties of polynucleotides known in the art. One type of vector is a “plasmid,” which refers to a circular double stranded DNA loop into which additional DNA segments can be inserted, such as by standard molecular cloning techniques. Another type of vector is a viral vector, wherein virally-derived DNA or RNA sequences are present in the vector for packaging into a virus (e.g., retroviruses, replication defective retroviruses, adenoviruses, replication defective adenoviruses, and adeno-associated viruses (AAVs)). Viral vectors also include polynucleotides carried by a virus for transfection into a host cell. Certain vectors are capable of autonomous replication in a host cell into which they are introduced (e.g., bacterial vectors having a bacterial origin of replication and episomal mammalian vectors). Other vectors (e.g., non-episomal mammalian vectors) are integrated into the genome of a host cell upon introduction into the host cell, and thereby are replicated along with the host genome. Moreover, certain vectors are capable of directing the expression of genes to which they are operatively-linked. Such vectors are referred to herein as “expression vectors.” Common expression vectors of utility in recombinant DNA techniques are often in the form of plasmids.

[0062] Recombinant expression vectors can be composed of a nucleic acid (e.g., a polynucleotide) of the invention in a form suitable for expression of the nucleic acid in a host cell, which means that the recombinant expression vectors include one or more regulatory elements, which can be selected on the basis of the host cells to be used for expression, that is operatively-linked to the nucleic acid sequence to be expressed. Within a recombinant expression vector, “operably linked” and “operatively-linked” are used interchangeably herein and further defined elsewhere herein. In the context of a vector, the term “operably linked” is intended to mean that the nucleotide sequence of interest is linked to the regulatory element(s) in a manner that allows for expression of the nucleotide sequence (e.g., in an in vitro transcription/translation system or in a host cell when the vector is introduced into the host cell). Advantageous vectors include adeno-associated viruses, and types of such vectors can also be selected for targeting particular types of cells, such as those engineered viral (e.g., AAV) vectors containing an engineered viral (e.g., AAV) capsid polynucleotide with a desired cell-specific tropism. These and other embodiments of the vectors and vector systems are described elsewhere herein.

[0063] In some embodiments, the vector can be a bicistronic vector. In some embodiments, a bicistronic vector can be used for one or more elements of the engineered viral (e.g., AAV) capsid system described herein. In some embodiments, expression of elements of the engineered viral (e.g., AAV) capsid system described herein can be driven by a suitable constitutive or tissue specific promoter. Where the element of the engineered viral (e.g., AAV) capsid system is an RNA, its expression can be driven by a Pol III promoter, such as a U6 promoter. In some embodiments, the two are combined.

### Cell-based Vector Amplification and Expression

[0064] Vectors can be designed for expression of one or more elements of the engineered viral (e.g., AAV) capsid system or other compositions containing an n-mer motif of the present invention described herein (e.g., nucleic acid transcripts, proteins, enzymes, and combinations thereof) in a suitable host cell. In some embodiments, the suitable host cell is a prokaryotic cell. Suitable host cells include, but are not limited to, bacterial cells, yeast cells, insect cells, and mammalian cells. The vectors can be viral-based or non-viral based. In some embodiments, the suitable host cell is a eukaryotic cell. In some embodiments, the suitable host cell is a suitable bacterial cell. Suitable bacterial cells include, but are not limited to, bacterial cells from the bacteria of the species Escherichia coli. Many suitable strains of E. coli are known in the art for expression of vectors. These include, but are not limited to Pir1, Stbl2, Stbl3, Stbl4, TOP10, XL1 Blue, and XL10 Gold. In some embodiments, the host cell is a suitable insect cell. Suitable insect cells include those from Spodoptera frugiperda. Suitable strains of S. frugiperda cells include, but are not limited to, Sf9 and Sf21. In some embodiments, the host cell is a suitable yeast cell. In some embodiments, the yeast cell can be from Saccharomyces cerevisiae. In some embodiments, the host cell is a suitable mammalian cell. Many types of mammalian cells have been developed to express vectors. Suitable mammalian cells include, but are not limited to, HEK293, Chinese Hamster Ovary Cells (CHOs), mouse myeloma cells, HeLa, U2OS, A549, HT1080, CAD, P19, NIH 3T3, L929, N2a, MCF-7, Y79, SO-Rb50, HepG G2, DIKX-X11, J558L, Baby hamster kidney cells (BHK), and chicken embryo fibroblasts (CEFs). Suitable host cells are discussed further in Goeddel, GENE EXPRESSION TECHNOLOGY: METHODS IN ENZYMOLOGY 185, Academic Press, San Diego, Calif. (1990).

[0065] In some embodiments, the vector can be a yeast expression vector. Examples of vectors for expression in yeast Saccharomyces cerevisiae include pYepSec1 (Baldari, et al., 1987. EMBO J. 6:229-234), pMFa (Kuijan and Herskowitz, 1982. Cell 30:933-943), pJRY88 (Schultz et al., 1987. Gene 54:113-123), pYES2 (Invitrogen Corporation, San Diego, Calif.), and picZ (In Vitrogen Corp, San Diego, Calif.). As used herein, a “yeast expression vector” refers to a nucleic acid that contains one or more sequences encoding an RNA and/or polypeptide and may further contain any desired elements that control the expression of the nucleic acid(s), as well as any elements that enable the replication and maintenance of the expression vector inside the yeast cell. Many suitable yeast expression vectors and features thereof are known in the art; for example, various vectors and techniques are illustrated in in Yeast Protocols, 2nd edition, Xiao, W., ed. (Humana Press, New York, 2007) and Buckholz, R. G. and Gleeson, M. A. (1991) Biotechnology (NY) 9 (11): 1067-72. Yeast vectors can contain, without limitation, a centromeric (CEN) sequence, an autonomous replication sequence (ARS), a promoter, such as an RNA Polymerase III promoter, operably linked to a sequence or gene of interest, a terminator such as an RNA polymerase III terminator, an origin of replication, and a marker gene (e.g., auxotrophic, antibiotic, or other selectable markers). Examples of expression vectors for use in yeast may include plasmids, yeast artificial chromosomes, 2μ plasmids, yeast integrative plasmids, yeast replicative plasmids, shuttle vectors, and episomal plasmids.

[0066] In some embodiments, the vector is a baculovirus vector or expression vector and can be suitable for expression of polynucleotides and/or proteins in insect cells. Baculovirus vectors available for expression of proteins in cultured insect cells (e.g., SF9 cells) include the pAc series (Smith, et al., 1983. Mol. Cell. Biol. 3:2156-2165) and the pVL series (Lucklow and Summers, 1989. Virology 170:31-39). rAAV (recombinant Adeno-associated viral) vectors are preferably produced in insect cells, e.g., Spodoptera frugiperda Sf9 insect cells, grown in serum-free suspension culture. Serum-free insect cells can be purchased from commercial vendors, e.g., Sigma Aldrich (EX-CELL 405).

[0067] In some embodiments, the vector is a mammalian expression vector. In some embodiments, the mammalian expression vector is capable of expressing one or more polynucleotides and/or polypeptides in a mammalian cell. Examples of mammalian expression vectors include, but are not limited to, pCDM8 (Seed, 1987. Nature 329:840) and pMT2PC (Kaufman, et al., 1987. EMBO J. 6:187-195). The mammalian expression vector can include one or more suitable regulatory elements capable of controlling expression of the one or more polynucleotides and/or proteins in the mammalian cell. For example, commonly used promoters are derived from polyoma, adenovirus 2, cytomegalovirus, simian virus 40, and others disclosed herein and known in the art. More detail on suitable regulatory elements is described elsewhere herein.

[0068] For other suitable expression vectors and vector systems for both prokaryotic and eukaryotic cells see, e.g., Chapters 16 and 17 of Sambrook, et al., MOLECULAR CLONING: A LABORATORY MANUAL. 2nd ed., Cold Spring Harbor Laboratory, Cold Spring Harbor Laboratory Press, Cold Spring Harbor, N.Y., 1989.

[0069] In some embodiments, the recombinant mammalian expression vector is capable of directing expression of the nucleic acid preferentially in a particular cell type (e.g., tissue-specific regulatory elements are used to express the nucleic acid). Tissue-specific regulatory elements are known in the art. Non-limiting examples of suitable tissue-specific promoters include the albumin promoter (liver-specific; Pinkert, et al., 1987. Genes Dev. 1:268-277), lymphoid-specific promoters (Calame and Eaton, 1988. Adv. Immunol. 43:235-275), in particular promoters of T cell receptors (Winoto and Baltimore, 1989. EMBO J. 8:729-733) and immunoglobulins (Baneiji, et al., 1983. Cell 33:729-740; Queen and Baltimore, 1983. Cell 33:741-748), neuron-specific promoters (e.g., the neurofilament promoter; Byrne and Ruddle, 1989. Proc. Natl. Acad. Sci. USA 86:5473-5477), pancreas-specific promoters (Edlund, et al., 1985. Science 230:912-916), and mammary gland-specific promoters (e.g., milk whey promoter; U.S. Pat. No. 4,873,316 and European Application Publication No. 264,166). Developmentally-regulated promoters are also encompassed, e.g., the murine hox promoters (Kessel and Gruss, 1990. Science 249:374-379) and the a-fetoprotein promoter (Campes and Tilghman, 1989. Genes Dev. 3:537-546). With regards to these prokaryotic and eukaryotic vectors, mention is made of U.S. Pat. No. 6,750,059, the contents of which are incorporated by reference herein in their entirety. Other embodiments can utilize viral vectors, with regards to which mention is made of U.S. patent application Ser. No. 13/092,085, the contents of which are incorporated by reference herein in their entirety. Tissue-specific regulatory elements are known in the art and in this regard, mention is made of U.S. Pat. No. 7,776,321, the contents of which are incorporated by reference herein in their entirety. In some embodiments, a regulatory element can be operably linked to one or more elements of an engineered AAV capsid system so as to drive expression of the one or more elements of the engineered AAV capsid system described herein.

[0070] Vectors may be introduced and propagated in a prokaryote or prokaryotic cell. In some embodiments, a prokaryote is used to amplify copies of a vector to be introduced into a eukaryotic cell or as an intermediate vector in the production of a vector to be introduced into a eukaryotic cell (e.g., amplifying a plasmid as part of a viral vector packaging system). In some embodiments, a prokaryote is used to amplify copies of a vector and express one or more nucleic acids, such as to provide a source of one or more proteins for delivery to a host cell or host organism.

[0071] In some embodiments, the vector can be a fusion vector or fusion expression vector. In some embodiments, fusion vectors add a number of amino acids to a protein encoded therein, such as to the amino terminus, carboxy terminus, or both of a recombinant protein. Such fusion vectors can serve one or more purposes, such as: (i) to increase expression of recombinant protein; (ii) to increase the solubility of the recombinant protein; and (iii) to aid in the purification of the recombinant protein by acting as a ligand in affinity purification. In some embodiments, expression of polynucleotides (such as non-coding polynucleotides) and proteins in prokaryotes can be carried out in Escherichia coli with vectors containing constitutive or inducible promoters directing the expression of either fusion or non-fusion polynucleotides and/or proteins. In some embodiments, the fusion expression vector can include a proteolytic cleavage site, which can be introduced at the junction of the fusion vector backbone or other fusion moiety and the recombinant polynucleotide or protein to enable separation of the recombinant polynucleotide or protein from the fusion vector backbone or other fusion moiety subsequent to purification of the fusion polynucleotide or protein. Such enzymes, and their cognate recognition sequences, include Factor Xa, thrombin and enterokinase. Example fusion expression vectors include pGEX (Pharmacia Biotech Inc; Smith and Johnson, 1988. Gene 67:31-40), pMAL (New England Biolabs, Beverly, Mass.) and pRIT5 (Pharmacia, Piscataway, N.J.) that fuse glutathione S-transferase (GST), maltose E binding protein, or protein A, respectively, to the target recombinant protein. Examples of suitable inducible non-fusion E. coli expression vectors include pTrc (Amrann et al., (1988) Gene 69:301-315) and pET 11d (Studier et al., GENE EXPRESSION TECHNOLOGY: METHODS IN ENZYMOLOGY 185, Academic Press, San Diego, Calif. (1990) 60-89).

[0072] In some embodiments, one or more vectors driving expression of one or more elements of an engineered viral (e.g., AAV) capsid system or other composition containing an n-mer motif described herein are introduced into a host cell such that expression of the elements of the engineered delivery system described herein direct formation of an engineered viral (e.g., AAV) capsid system or other composition containing an n-mer motif described herein (including but not limited to an engineered gene transfer agent particle, which is described in greater detail elsewhere herein). For example, different elements of the engineered viral (e.g., AAV) capsid system or other composition containing an n-mer motif described herein can each be operably linked to separate regulatory elements on separate vectors. RNA(s) of different elements of the engineered delivery system described herein can be delivered to an animal or mammal or cell thereof to produce an animal or mammal or cell thereof that constitutively or inducibly or conditionally expresses different elements of the engineered viral (e.g., AAV) capsid system or other composition containing an n-mer motif described herein that incorporates one or more elements of the engineered viral (e.g., AAV) capsid system or other composition containing an n-mer motif described herein or contains one or more cells that incorporates and/or expresses one or more elements of the engineered viral (e.g., AAV) capsid system or other composition containing an n-mer motif described herein.

[0073] In some embodiments, two or more of the elements expressed from the same or different regulatory element(s) can be combined in a single vector, with one or more additional vectors providing any components of the system not included in the first vector. Engineered polynucleotides of the present invention that are combined in a single vector may be arranged in any suitable orientation, such as one element located 5′ with respect to (“upstream” of) or 3′ with respect to (“downstream” of) a second element. The coding sequence of one element may be located on the same or opposite strand of the coding sequence of a second element, and oriented in the same or opposite direction. In some embodiments, a single promoter drives expression of a transcript encoding one or more engineered viral (e.g., AAV) capsid proteins or other composition containing an n-mer motif described herein, embedded within one or more intron sequences (e.g., each in a different intron, two or more in at least one intron, or all in a single intron). In some embodiments, the engineered polynucleotides of the present invention (including but not limited to engineered viral polynucleotides) can be operably linked to and expressed from the same promoter.

### Vector Features

[0074] The vectors can include additional features that can confer one or more functionalities to the vector, the polynucleotide to be delivered, a virus particle produced there from, or polypeptide expressed thereof. Such features include, but are not limited to, regulatory elements, selectable markers, molecular identifiers (e.g., molecular barcodes), stabilizing elements, and the like. It will be appreciated by those skilled in the art that the design of the expression vector and additional features included can depend on such factors as the choice of the host cell to be transformed, the level of expression desired, etc.

### Regulatory Elements

[0075] In embodiments, the polynucleotides and/or vectors thereof described herein (including, but not limited to, the engineered AAV capsid polynucleotides of the present invention) can include one or more regulatory elements that can be operatively linked to the polynucleotide. The term “regulatory element” is intended to include promoters, enhancers, internal ribosomal entry sites (IRES), and other expression control elements (e.g., transcription termination signals, such as polyadenylation signals and poly-U sequences). Such regulatory elements are described, for example, in Goeddel, GENE EXPRESSION TECHNOLOGY: METHODS IN ENZYMOLOGY 185, Academic Press, San Diego, Calif. (1990). Regulatory elements include those that direct constitutive expression of a nucleotide sequence in many types of host cell and those that direct expression of the nucleotide sequence only in certain host cells (e.g., tissue-specific regulatory sequences). A tissue-specific promoter can direct expression primarily in a desired tissue of interest, such as muscle, neuron, bone, skin, blood, specific organs (e.g., liver, brain), or particular cell types (e.g., lymphocytes). Regulatory elements may also direct expression in a temporal-dependent manner, such as in a cell-cycle dependent or developmental stage-dependent manner, which may or may not also be tissue or cell-type specific. In some embodiments, a vector comprises one or more pol III promoter (e.g., 1, 2, 3, 4, 5, or more pol III promoters), one or more pol II promoters (e.g., 1, 2, 3, 4, 5, or more pol II promoters), one or more pol I promoters (e.g., 1, 2, 3, 4, 5, or more pol I promoters), or combinations thereof. Examples of pol III promoters include, but are not limited to, U6 and H1 promoters. Examples of pol II promoters include, but are not limited to, the retroviral Rous sarcoma virus (RSV) LTR promoter (optionally with the RSV enhancer), the cytomegalovirus (CMV) promoter (optionally with the CMV enhancer) (see, e.g., Boshart et al, Cell, 41:521-530 (1985)), the SV40 promoter, the dihydrofolate reductase promoter, the β-actin promoter, the phosphoglycerol kinase (PGK) promoter, and the EF1α promoter. Also encompassed by the term “regulatory element” are enhancer elements, such as WPRE; CMV enhancers; the R-U5′ segment in LTR of HTLV-I (Mol. Cell. Biol., Vol. 8 (1), p. 466-472, 1988); SV40 enhancer; and the intron sequence between exons 2 and 3 of rabbit B-globin (Proc. Natl. Acad. Sci. USA., Vol. 78 (3), p. 1527-31, 1981).

[0076] In some embodiments, the regulatory sequence can be a regulatory sequence described in U.S. Pat. No. 7,776,321, U.S. Pat. Pub. No. 2011/0027239, and PCT publication WO 2011/028929, the contents of which are incorporated by reference herein in their entirety. In some embodiments, the vector can contain a minimal promoter. In some embodiments, the minimal promoter is the Mecp2 promoter, tRNA promoter, or U6. In a further embodiment, the minimal promoter is tissue specific. In some embodiments, the length of the vector polynucleotide the minimal promoters and polynucleotide sequences is less than 4.4Kb.

[0077] To express a polynucleotide, the vector can include one or more transcriptional and/or translational initiation regulatory sequences, e.g., promoters, that direct the transcription of the gene and/or translation of the encoded protein in a cell. In some embodiments a constitutive promoter may be employed. Suitable constitutive promoters for mammalian cells are generally known in the art and include, but are not limited to SV40, CAG, CMV, EF-1α, B-actin, RSV, and PGK. Suitable constitutive promoters for bacterial cells, yeast cells, and fungal cells are generally known in the art, such as a T-7 promoter for bacterial expression and an alcohol dehydrogenase promoter for expression in yeast.

[0078] In some embodiments, the regulatory element can be a regulated promoter. “Regulated promoter” refers to promoters that direct gene expression not constitutively, but in a temporally-and/or spatially-regulated manner, and includes tissue-specific, tissue-preferred and inducible promoters. In some embodiments, the regulated promoter is a tissue specific promoter as previously discussed elsewhere herein. Regulated promoters include conditional promoters and inducible promoters. In some embodiments, conditional promoters can be employed to direct expression of a polynucleotide in a specific cell type, under certain environmental conditions, and/or during a specific state of development. Suitable tissue specific promoters can include, but are not limited to, liver specific promoters (e.g., APOA2, SERPIN A1 (hAAT), CYP3A4, and MIR122), pancreatic cell promoters (e.g., INS, IRS2, Pdx1, A1x3, Ppy), cardiac specific promoters (e.g., Myh6 (alpha MHC), MYL2 (MLC-2v), TNI3 (cTn1), NPPA (ANF), Slc8a1 (Ncx1)), central nervous system cell promoters (SYN1, GFAP, INA, NES, MOBP, MBP, TH, FOXA2 (HNF3 beta)), skin cell specific promoters (e.g., FLG, K14, TGM3), immune cell specific promoters, (e.g., ITGAM, CD43 promoter, CD14 promoter, CD45 promoter, CD68 promoter), urogenital cell specific promoters (e.g., Pbsn, Upk2, Sbp, Fer114), endothelial cell specific promoters (e.g., ENG), pluripotent and embryonic germ layer cell specific promoters (e.g., Oct4, NANOG, Synthetic Oct4, T brachyury, NES, SOX17, FOXA2, MIR122), and muscle cell specific promoter (e.g., Desmin). Other tissue and/or cell specific promoters are discussed elsewhere herein and can be generally known in the art and are within the scope of this disclosure.

[0079] Inducible/conditional promoters can be positively inducible/conditional promoters (e.g., a promoter that activates transcription of the polynucleotide upon appropriate interaction with an activated activator, or an inducer (compound, environmental condition, or other stimulus) or a negative/conditional inducible promoter (e.g., a promoter that is repressed (e.g., bound by a repressor) until the repressor condition of the promotor is removed (e.g., inducer binds a repressor bound to the promoter stimulating release of the promoter by the repressor or removal of a chemical repressor from the promoter environment). The inducer can be a compound, environmental condition, or other stimulus. Thus, inducible/conditional promoters can be responsive to any suitable stimuli such as chemical, biological, or other molecular agents, temperature, light, and/or pH. Suitable inducible/conditional promoters include, but are not limited to, Tet-On, Tet-Off, Lac promoter, pBad, AlcA, LexA, Hsp70 promoter, Hsp90 promoter, pDawn, XVE/OlexA, GVG, and pOp/LhGR.

[0080] In some embodiments, the vector or system thereof can include one or more elements capable of translocating and/or expressing an engineered polynucleotide of the present invention (e.g., an engineered viral (e.g., AAV) capsid polynucleotide) to/in a specific cell component or organelle. Such organelles can include, but are not limited to, nucleus, ribosome, endoplasmic reticulum, Golgi apparatus, chloroplast, mitochondria, vacuole, lysosome, cytoskeleton, plasma membrane, cell wall, peroxisome, centrioles, etc.

### Selectable Markers and Tags

[0081] One or more of the engineered polynucleotides of the present invention (e.g., an engineered viral (e.g., AAV) capsid polynucleotide) can be operably linked, fused to, or otherwise modified to include a polynucleotide that encodes or is a selectable marker or tag, which can be a polynucleotide or polypeptide. In some embodiments, the polypeptide encoding a polypeptide selectable marker can be incorporated in the engineered polynucleotide of the present invention (e.g., an engineered viral (e.g., AAV) capsid polynucleotide) such that the selectable marker polypeptide, when translated, is inserted between two amino acids between the N- and C-terminus of an engineered polypeptide (e.g., the engineered AAV capsid polypeptide) or at the N- and/or C-terminus of the engineered polypeptide (e.g., an engineered AAV capsid polypeptide). In some embodiments, the selectable marker or tag is a polynucleotide barcode or unique molecular identifier (UMI).

[0082] It will be appreciated that the polynucleotide encoding such selectable markers or tags can be incorporated into a polynucleotide encoding one or more components of the engineered AAV capsid system described herein in an appropriate manner to allow expression of the selectable marker or tag. Such techniques and methods are described elsewhere herein and will be instantly appreciated by one of ordinary skill in the art in view of this disclosure. Many such selectable markers and tags are generally known in the art and are intended to be within the scope of this disclosure.

[0083] Suitable selectable markers and tags include, but are not limited to, affinity tags, such as chitin binding protein (CBP), maltose binding protein (MBP), glutathione-S-transferase (GST), poly (His) tag; solubilization tags such as thioredoxin (TRX) and poly (NANP), MBP, and GST; chromatography tags such as those consisting of polyanionic amino acids, such as FLAG-tag; epitope tags such as V5-tag, Myc-tag, HA-tag and NE-tag; protein tags that can allow specific enzymatic modification (such as biotinylation by biotin ligase) or chemical modification (such as reaction with FLASH-EDT2 for fluorescence imaging), DNA and/or RNA segments that contain restriction enzyme or other enzyme cleavage sites; DNA segments that encode products that provide resistance against otherwise toxic compounds including antibiotics, such as, spectinomycin, ampicillin, kanamycin, tetracycline, Basta, neomycin phosphotransferase II (NEO), hygromycin phosphotransferase (HPT)) and the like; DNA and/or RNA segments that encode products that are otherwise lacking in the recipient cell (e.g., tRNA genes, auxotrophic markers); DNA and/or RNA segments that encode products which can be readily identified (e.g., phenotypic markers such as B-galactosidase, GUS; fluorescent proteins such as green fluorescent protein (GFP), cyan (CFP), yellow (YFP), red (RFP), luciferase, and cell surface proteins); polynucleotides that can generate one or more new primer sites for PCR (e.g., the juxtaposition of two DNA sequences not previously juxtaposed), DNA sequences not acted upon or acted upon by a restriction endonuclease or other DNA modifying enzyme, chemical, etc.; epitope tags (e.g., GFP, FLAG- and His-tags), and, DNA sequences that make a molecular barcode or unique molecular identifier (UMI), DNA sequences required for a specific modification (e.g., methylation) that allows its identification. Other suitable markers will be appreciated by those of skill in the art.

[0084] Selectable markers and tags can be operably linked to one or more components of the engineered AAV capsid system or other compositions and/or systems described herein via suitable linker, such as a glycine or glycine serine linkers as short as GS or GG up to (GGGGG)₃ (SEQ ID NO: 251) or (GGGGS)₃ (SEQ ID NO: 252). Other suitable linkers are described elsewhere herein.

[0085] The vector or vector system can include one or more polynucleotides encoding one or more n-mers. In some embodiments, the n-mer encoding polynucleotides can be included in the vector or vector system, such as a viral vector system, such that they are expressed within and/or on the virus particle(s) produced such that the virus particles can be targeted to specific cells, tissues, organs, etc. In some embodiments, the n-mer encoding polynucleotides can be included in the vector or vector system such that the engineered polynucleotide(s) of the present invention (e.g., an engineered viral (e.g., AAV) capsid polynucleotide(s)) and/or products expressed therefrom include the n-mer and can be targeted to specific cells, tissues, organs, etc. In some embodiments, such as non-viral carriers, the n-mer can be attached to the carrier (e.g., polymer, lipid, inorganic molecule etc.) and can be capable of targeting the carrier and any attached or associated engineered polynucleotide(s) of the present invention, the engineered polypeptides, or other compositions of the present invention described herein, to specific cells, tissues, organs, etc. In some embodiments, the specific cells are CNS cells.

### Cell-Free Vector and Polynucleotide Expression

[0086] In some embodiments, the polynucleotide(s) encoding an n-mer motif of the present invention can be expressed from a vector or suitable polynucleotide in a cell-free in vitro system. In some embodiments, the polynucleotide encoding one or more features of the engineered AAV capsid system can be expressed from a vector or suitable polynucleotide in a cell-free in vitro system. In other words, the polynucleotide can be transcribed and optionally translated in vitro. In vitro transcription/translation systems and appropriate vectors are generally known in the art and commercially available. Generally, in vitro transcription and in vitro translation systems replicate the processes of RNA and protein synthesis, respectively, outside of the cellular environment. Vectors and suitable polynucleotides for in vitro transcription can include T7, SP6, T3, promoter regulatory sequences that can be recognized and acted upon by an appropriate polymerase to transcribe the polynucleotide or vector.

[0087] In vitro translation can be stand-alone (e.g., translation of a purified polyribonucleotide) or linked/coupled to transcription. In some embodiments, the cell-free (or in vitro) translation system can include extracts from rabbit reticulocytes, wheat germ, and/or E. coli. The extracts can include various macromolecular components that are needed for translation of exogenous RNA (e.g., 70S or 80S ribosomes, tRNAs, aminoacyl-tRNA, synthetases, initiation, elongation factors, termination factors, etc.). Other components can be included or added during the translation reaction, including but not limited to, amino acids, energy sources (ATP, GTP), energy regenerating systems (creatine phosphate and creatine phosphokinase (eukaryotic systems)) (phosphoenol pyruvate and pyruvate kinase for bacterial systems), and other co-factors (Mg2+, K+, etc.). As previously mentioned, in vitro translation can be based on RNA or DNA starting material. Some translation systems can utilize an RNA template as starting material (e.g., reticulocyte lysates and wheat germ extracts). Some translation systems can utilize a DNA template as a starting material (e.g., E coli-based systems). In these systems transcription and translation are coupled and DNA is first transcribed into RNA, which is subsequently translated. Suitable standard and coupled cell-free translation systems are generally known in the art and are commercially available.

### Codon Optimization of Vector Polynucleotides

[0088] As described elsewhere herein, the polynucleotide encoding an n-mer motif of the present invention and/or other polynucleotides described herein can be codon optimized. In some embodiments, polynucleotides of the engineered AAV capsid system described herein can be codon optimized. In some embodiments, one or more polynucleotides contained in a vector (“vector polynucleotides”) described herein that are in addition to an optionally codon optimized polynucleotide encoding an n-mer motif, including but not limited to, embodiments of the engineered AAV capsid system described herein, can be codon optimized. In general, codon optimization refers to a process of modifying a nucleic acid sequence for enhanced expression in the host cells of interest by replacing at least one codon (e.g., about or more than about 1, 2, 3, 4, 5, 10, 15, 20, 25, 50, or more codons) of the native sequence with codons that are more frequently or most frequently used in the genes of that host cell while maintaining the native amino acid sequence. Various species exhibit particular bias for certain codons of a particular amino acid. Codon bias (differences in codon usage between organisms) often correlates with the efficiency of translation of messenger RNA (mRNA), which is in turn believed to be dependent on, among other things, the properties of the codons being translated and the availability of particular transfer RNA (tRNA) molecules. The predominance of selected tRNAs in a cell is generally a reflection of the codons used most frequently in peptide synthesis. Accordingly, genes can be tailored for optimal gene expression in a given organism based on codon optimization. Codon usage tables are readily available, for example, at the “Codon Usage Database” available at www.kazusa.orjp/codon/and these tables can be adapted in a number of ways. See Nakamura, Y., et al. “Codon usage tabulated from the international DNA sequence databases: status for the year 2000” Nucl. Acids Res. 28:292 (2000). Computer algorithms for codon optimizing a particular sequence for expression in a particular host cell are also available, such as Gene Forge (Aptagen; Jacobus, PA), are also available. In some embodiments, one or more codons (e.g., 1, 2, 3, 4, 5, 10, 15, 20, 25, 50, or more, or all codons) in a sequence encoding a DNA/RNA-targeting Cas protein corresponds to the most frequently used codon for a particular amino acid. As to codon usage in yeast, reference is made to the online Yeast Genome database available at http://www.yeastgenome.org/community/codon_usage.shtml, or Codon selection in yeast, Bennetzen and Hall, J Biol Chem. 1982 Mar. 25;257 (6): 3026-31. As to codon usage in plants including algae, reference is made to Codon usage in higher plants, green algae, and cyanobacteria, Campbell and Gowri, Plant Physiol. 1990 January; 92 (1): 1-11.; as well as Codon usage in plant genes, Murray et al, Nucleic Acids Res. 1989 Jan. 25; 17 (2): 477-98; or Selection on the codon bias of chloroplast and cyanelle genes in different plant and algal lineages, Morton BR, J Mol Evol. 1998 April; 46 (4): 449-59.

[0089] The vector polynucleotide can be codon optimized for expression in a specific cell-type, tissue type, organ type, and/or subject type. In some embodiments, a codon optimized sequence is a sequence optimized for expression in a eukaryote, e.g., humans (i.e., being optimized for expression in a human or human cell), or for another eukaryote, such as another animal (e.g., a mammal or avian) as is described elsewhere herein. Such codon optimized sequences are within the ambit of the ordinary skilled artisan in view of the description herein. In some embodiments, the polynucleotide is codon optimized for a specific cell type. Such cell types can include, but are not limited to, epithelial cells (including skin cells, cells lining the gastrointestinal tract, cells lining other hollow organs), nerve cells (nerves, brain cells, spinal column cells, nerve support cells (e.g., astrocytes, glial cells, Schwann cells etc.), muscle cells (e.g., cardiac muscle, smooth muscle cells, and skeletal muscle cells), connective tissue cells (fat and other soft tissue padding cells, bone cells, tendon cells, cartilage cells), blood cells, stem cells and other progenitor cells, immune system cells, germ cells, and combinations thereof. Such codon optimized sequences are within the ambit of the ordinary skilled artisan in view of the description herein. In some embodiments, the polynucleotide is codon optimized for a specific tissue type. Such tissue types can include, but are not limited to, muscle tissue, connective tissue, nervous tissue, and epithelial tissue. Such codon optimized sequences are within the ambit of the ordinary skilled artisan in view of the description herein. In some embodiments, the polynucleotide is codon optimized for a specific organ. Such organs include, but are not limited to, muscles, skin, intestines, liver, spleen, brain, lungs, stomach, heart, kidneys, gallbladder, pancreas, bladder, thyroid, bone, blood vessels, blood, and combinations thereof. Such codon optimized sequences are within the ambit of the ordinary skilled artisan in view of the description herein.

[0090] In some embodiments, a vector polynucleotide is codon optimized for expression in particular cells, such as prokaryotic or eukaryotic cells. The eukaryotic cells may be those of or derived from a particular organism, such as a plant or a mammal, including but not limited to human, or non-human eukaryote or animal or mammal as discussed herein, e.g., mouse, rat, rabbit, dog, livestock, or non-human mammal or primate.

### Non-Viral Vectors and Carriers

[0091] In some embodiments, the vector is a non-viral vector or carrier. In some embodiments, non-viral vectors can have the advantage(s) of reduced toxicity and/or immunogenicity and/or increased bio-safety as compared to viral vectors The terms of art “Non-viral vectors and carriers” and as used herein in this context refers to molecules and/or compositions that are not based on one or more component of a virus or virus genome (excluding any nucleotide to be delivered and/or expressed by the non-viral vector) that can be capable of attaching to, incorporating, coupling, and/or otherwise interacting with an engineered capsid polynucleotide (e.g., an engineered AAV capsid polynucleotide) or other composition of the present invention described herein and can be capable of ferrying the polynucleotide to a cell and/or expressing the polynucleotide. It will be appreciated that this does not exclude the inclusion of a virus-based polynucleotide that is to be delivered. For example, if a gRNA to be delivered is directed against a virus component and it is inserted or otherwise coupled to an otherwise non-viral vector or carrier, this would not make said vector a “viral vector”. Non-viral vectors and carriers include naked polynucleotides, chemical-based carriers, polynucleotide (non-viral) based vectors, and particle-based carriers. It will be appreciated that the term “vector” as used in the context of non-viral vectors and carriers refers to polynucleotide vectors and “carriers” used in this context refers to a non-nucleic acid or polynucleotide molecule or composition that be attached to or otherwise interact with a polynucleotide to be delivered, such as an engineered AAV capsid polynucleotide of the present invention.

### Naked Polynucleotides

[0092] In some embodiments one or more engineered AAV capsid polynucleotides or other polynucleotides of the present invention described elsewhere herein can be included in a naked polynucleotide. The term of art “naked polynucleotide” as used herein refers to polynucleotides that are not associated with another molecule (e.g., proteins, lipids, and/or other molecules) that can often help protect it from environmental factors and/or degradation. As used herein, associated with includes, but is not limited to, linked to, adhered to, adsorbed to, enclosed in, enclosed in or within, mixed with, and the like. Naked polynucleotides that include one or more of the engineered AAV capsid polynucleotides or other polynucleotides of the present invention described herein can be delivered directly to a host cell and optionally expressed therein. The naked polynucleotides can have any suitable two- and three-dimensional configurations. By way of non-limiting examples, naked polynucleotides can be single-stranded molecules, double stranded molecules, circular molecules (e.g., plasmids and artificial chromosomes), molecules that contain portions that are single stranded and portions that are double stranded (e.g., ribozymes), and the like. In some embodiments, the naked polynucleotide contains only the engineered AAV capsid polynucleotide(s) or other polynucleotides of the present invention. In some embodiments, the naked polynucleotide can contain other nucleic acids and/or polynucleotides in addition to the engineered AAV capsid polynucleotide(s) or other polynucleotides of the present invention described elsewhere herein. The naked polynucleotides can include one or more elements of a transposon system. Transposons and system thereof are described in greater detail elsewhere herein.

### Non-Viral Polynucleotide Vectors

[0093] In some embodiments, one or more of the engineered AAV capsid polynucleotides or other polynucleotides of the present invention can be included in a non-viral polynucleotide vector. Suitable non-viral polynucleotide vectors include, but are not limited to, transposon vectors and vector systems, plasmids, bacterial artificial chromosomes, yeast artificial chromosomes, AR (antibiotic resistance)-free plasmids and miniplasmids, circular covalently closed vectors (e.g., minicircles, minivectors, miniknots,), linear covalently closed vectors (“dumbbell shaped”), MIDGE (minimalistic immunologically defined gene expression) vectors, MiLV (micro-linear vector) vectors, Ministrings, mini-intronic plasmids, PSK systems (post-segregationally killing systems), ORT (operator repressor titration) plasmids, and the like. See e.g., Hardee et al. 2017. Genes. 8 (2): 65.

[0094] In some embodiments, the non-viral polynucleotide vector can have a conditional origin of replication. In some embodiments, the non-viral polynucleotide vector can be an ORT plasmid. In some embodiments, the non-viral polynucleotide vector can have a minimalistic immunologically defined gene expression. In some embodiments, the non-viral polynucleotide vector can have one or more post-segregationally killing system genes. In some embodiments, the non-viral polynucleotide vector is AR-free. In some embodiments, the non-viral polynucleotide vector is a minivector. In some embodiments, the non-viral polynucleotide vector includes a nuclear localization signal. In some embodiments, the non-viral polynucleotide vector can include one or more CpG motifs. In some embodiments, the non-viral polynucleotide vectors can include one or more scaffold/matrix attachment regions (S/MARs). See e.g., Mirkovitch et al. 1984. Cell. 39:223-232, Wong et al. 2015. Adv. Genet. 89:113-152, whose techniques and vectors can be adapted for use in the present invention. S/MARs are AT-rich sequences that play a role in the spatial organization of chromosomes through DNA loop base attachment to the nuclear matrix. S/MARs are often found close to regulatory elements such as promoters, enhancers, and origins of DNA replication. Inclusion of one or S/MARs can facilitate a once-per-cell-cycle replication to maintain the non-viral polynucleotide vector as an episome in daughter cells. In embodiments, the S/MAR sequence is located downstream of an actively transcribed polynucleotide (e.g., one or more engineered AAV capsid polynucleotides or other polynucleotides or molecules of the present invention) included in the non-viral polynucleotide vector. In some embodiments, the S/MAR can be a S/MAR from the beta-interferon gene cluster. See e.g., Verghese et al. 2014. Nucleic Acid Res. 42: e53; Xu et al. 2016. Sci. China Life Sci. 59:1024-1033; Jin et al. 2016. 8:702-711; Koirala et al. 2014. Adv. Exp. Med. Biol. 801:703-709; and Nehlsen et al. 2006. Gene Ther. Mol. Biol. 10:233-244, whose techniques and vectors can be adapted for use in the present invention.

[0095] In some embodiments, the non-viral vector is a transposon vector or system thereof. As used herein, “transposon” (also referred to as transposable element) refers to a polynucleotide sequence that is capable of moving form location in a genome to another. There are several classes of transposons. Transposons include retrotransposons and DNA transposons. Retrotransposons require the transcription of the polynucleotide that is moved (or transposed) in order to transpose the polynucleotide to a new genome or polynucleotide. DNA transposons are those that do not require reverse transcription of the polynucleotide that is moved (or transposed) in order to transpose the polynucleotide to a new genome or polynucleotide. In some embodiments, the non-viral polynucleotide vector can be a retrotransposon vector. In some embodiments, the retrotransposon vector includes long terminal repeats. In some embodiments, the retrotransposon vector does not include long terminal repeats. In some embodiments, the non-viral polynucleotide vector can be a DNA transposon vector. DNA transposon vectors can include a polynucleotide sequence encoding a transposase. In some embodiments, the transposon vector is configured as a non-autonomous transposon vector, meaning that the transposition does not occur spontaneously on its own. In some of these embodiments, the transposon vector lacks one or more polynucleotide sequences encoding proteins required for transposition. In some embodiments, the non-autonomous transposon vectors lack one or more Ac elements.

[0096] In some embodiments a non-viral polynucleotide transposon vector system can include a first polynucleotide vector that contains the engineered AAV capsid polynucleotide(s) or other polynucleotides, or molecules of the present invention described herein flanked on the 5′ and 3′ ends by transposon terminal inverted repeats (TIRs) and a second polynucleotide vector that includes a polynucleotide capable of encoding a transposase coupled to a promoter to drive expression of the transposase. When both are expressed in the same cell the transposase can be expressed from the second vector and can transpose the material between the TIRs on the first vector (e.g., the engineered AAV capsid polynucleotide(s) or other polynucleotides or molecules of the present invention) and integrate it into one or more positions in the host cell's genome. In some embodiments the transposon vector or system thereof can be configured as a gene trap. In some embodiments, the TIRs can be configured to flank a strong splice acceptor site followed by a reporter and/or other gene (e.g., one or more of the engineered AAV capsid polynucleotide(s) or other polynucleotides or molecules of the present invention) and a strong poly A tail. When transposition occurs while using this vector or system thereof, the transposon can insert into an intron of a gene and the inserted reporter or other gene can provoke a mis-splicing process and as a result it in activates the trapped gene.

[0097] Any suitable transposon system can be used. Suitable transposon and systems thereof can include Sleeping Beauty transposon system (Tc1/mariner superfamily) (see e.g., Ivics et al. 1997. Cell. 91 (4): 501-510), piggyBac (piggyBac superfamily) (see e.g., Li et al. 2013 110 (25): E2279-E2287 and Yusa et al. 2011. PNAS. 108 (4): 1531-1536), Tol2 (superfamily hAT), Frog Prince (Tc1/mariner superfamily) (see e.g., Miskey et al. 2003 Nucleic Acid Res. 31 (23): 6873-6881) and variants thereof.

### Chemical Carriers

[0098] In some embodiments the engineered AAV capsid polynucleotide(s) or other polynucleotides or other molecules of the present invention described herein can be coupled to a chemical carrier. Chemical carriers that can be suitable for delivery of polynucleotides can be broadly classified into the following classes: (i) inorganic particles, (ii) lipid-based, (iii) polymer-based, and (iv) peptide based. They can be categorized as (1) those that can form condensed complexes with a polynucleotide (such as the engineered AAV capsid polynucleotide(s) of the present invention), (2) those capable of targeting specific cells, (3) those capable of increasing delivery of the polynucleotide or other molecules (such as the engineered AAV capsid polynucleotide(s)) of the present invention to the nucleus or cytosol of a host cell, (4) those capable of disintegrating from DNA/RNA in the cytosol of a host cell, and (5) those capable of sustained or controlled release. It will be appreciated that any one given chemical carrier can include features from multiple categories. The term “particle” as used herein, refers to any suitable sized particles for delivery of the compositions (including particles, polypeptides, polynucleotides, and other compositions described herein) present invention described herein. Suitable sizes include macro-, micro-, and nano-sized particles.

[0099] In some embodiments, the non-viral carrier can be an inorganic particle. In some embodiments, the inorganic particle, can be a nanoparticle. The inorganic particles can be configured and optimized by varying size, shape, and/or porosity. In some embodiments, the inorganic particles are optimized to escape from the reticulo endothelial system. In some embodiments, the inorganic particles can be optimized to protect an entrapped molecule from degradation. The suitable inorganic particles that can be used as non-viral carriers in this context can include, but are not limited to, calcium phosphate, silica, metals (e.g., gold, platinum, silver, palladium, rhodium, osmium, iridium, ruthenium, mercury, copper, rhenium, titanium, niobium, tantalum, and combinations thereof), magnetic compounds, particles, and materials, (e.g., supermagnetic iron oxide and magnetite), quantum dots, fullerenes (e.g., carbon nanoparticles, nanotubes, nanostrings, and the like), and combinations thereof. Other suitable inorganic non-viral carriers are discussed elsewhere herein.

[0100] In some embodiments, the non-viral carrier can be lipid-based. Suitable lipid-based carriers are also described in greater detail herein. In some embodiments, the lipid-based carrier includes a cationic lipid or an amphiphilic lipid that is capable of binding or otherwise interacting with a negative charge on the polynucleotide to be delivered (e.g., such as an engineered AAV capsid polynucleotide of the present invention). In some embodiments, chemical non-viral carrier systems can include a polynucleotide (such as the engineered AAV capsid polynucleotide(s)) or other composition or molecule of the present invention) and a lipid (such as a cationic lipid). These are also referred to in the art as lipoplexes. Other embodiments of lipoplexes are described elsewhere herein. In some embodiments, the non-viral lipid-based carrier can be a lipid nano emulsion. Lipid nano emulsions can be formed by the dispersion of an immiscible liquid in another stabilized emulsifying agent and can have particles of about 200 nm that are composed of the lipid, water, and surfactant that can contain the polynucleotide to be delivered (e.g., the engineered AAV capsid polynucleotide(s) of the present invention). In some embodiments, the lipid-based non-viral carrier can be a solid lipid particle or nanoparticle.

[0101] In some embodiments, the non-viral carrier can be peptide-based. In some embodiments, the peptide-based non-viral carrier can include one or more cationic amino acids. In some embodiments, 35 to 40, 45, 50, 55, 60, 65, 70, 75, 80, 85, 90, 95, 99 or 100% of the amino acids are cationic. In some embodiments, peptide carriers can be used in conjunction with other types of carriers (e.g., polymer-based carriers and lipid-based carriers to functionalize these carriers). In some embodiments, the functionalization is targeting a host cell. Suitable polymers that can be included in the polymer-based non-viral carrier can include, but are not limited to, polyethylenimine (PEI), chitosan, poly (DL-lactide) (PLA), poly (DL-Lactide-co-glycoside) (PLGA), dendrimers (see e.g., US Pat. Pub. 2017/0079916 whose techniques and compositions can be adapted for use with the engineered AAV capsid polynucleotides of the present invention), polymethacrylate, and combinations thereof.

[0102] In some embodiments, the non-viral carrier can be configured to release an engineered delivery system polynucleotide that is associated with or attached to the non-viral carrier in response to an external stimulus, such as pH, temperature, osmolarity, concentration of a specific molecule or composition (e.g., calcium, NaCl, and the like), pressure and the like. In some embodiments, the non-viral carrier can be a particle that is configured includes one or more of the engineered AAV capsid polynucleotides or other compositions of the present invention describe herein and an environmental triggering agent response element, and optionally a triggering agent. In some embodiments, the particle can include a polymer that can be selected from the group of polymethacrylates and polyacrylates. In some embodiments, the non-viral particle can include one or more embodiments of the compositions microparticles described in US Pat. Pubs. 20150232883 and 20050123596, whose techniques and compositions can be adapted for use in the present invention.

[0103] In some embodiments, the non-viral carrier can be a polymer-based carrier. In some embodiments, the polymer is cationic or is predominantly cationic such that it can interact in a charge-dependent manner with the negatively charged polynucleotide to be delivered (such as the engineered AAV capsid polynucleotide(s) of the present invention). Polymer-based systems are described in greater detail elsewhere herein.

### Viral Vectors

[0104] In some embodiments, the vector is a viral vector. The term of art “viral vector” and as used herein in this context refers to polynucleotide based vectors that contain one or more elements from or based upon one or more elements of a virus that can be capable of expressing and packaging a polynucleotide, such as an engineered AAV capsid polynucleotide, cargo, or other composition or molecule of the present invention, into a virus particle and producing said virus particle when used alone or with one or more other viral vectors (such as in a viral vector system). Viral vectors and systems thereof can be used for producing viral particles for delivery of and/or expression and/or generation of one or more compositions of the present invention described herein (including, but not limited to, any viral particle and associated cargo). The viral vector can be part of a viral vector system involving multiple vectors. In some embodiments, systems incorporating multiple viral vectors can increase the safety of these systems. Suitable viral vectors can include adenoviral-based vectors, adeno associated vectors, helper-dependent adenoviral (HdAd) vectors, hybrid adenoviral vectors, and the like. Other embodiments of viral vectors and viral particles produce therefrom are described elsewhere herein. In some embodiments, the viral vectors are configured to produce replication incompetent viral particles for improved safety of these systems.

### Adenoviral Vectors, Helper-Dependent Adenoviral Vectors, and Hybrid Adenoviral Vectors

[0105] In some embodiments, the vector can be an adenoviral vector. In some embodiments, the adenoviral vector can include elements such that the virus particle produced using the vector or system thereof can be serotype 2, 5, or 9. In some embodiments, the polynucleotide to be delivered via the adenoviral particle can be up to about 8 kb. Thus, in some embodiments, an adenoviral vector can include a DNA polynucleotide to be delivered that can range in size from about 0.001 kb to about 8 kb. Adenoviral vectors have been used successfully in several contexts (see e.g., Teramato et al. 2000. Lancet. 355:1911-1912; Lai et al. 2002. DNA Cell. Biol. 21:895-913; Flotte et al., 1996. Hum. Gene. Ther. 7:1145-1159; and Kay et al. 2000. Nat. Genet. 24:257-261. The engineered AAV capsids can be included in an adenoviral vector to produce adenoviral particles containing said engineered AAV capsids.

[0106] In some embodiments the vector can be a helper-dependent adenoviral vector or system thereof. These are also referred to in the field as “gutless” or “gutted” vectors and are a modified generation of adenoviral vectors (see e.g., Thrasher et al. 2006. Nature. 443: E5-7). In embodiments of the helper-dependent adenoviral vector system one vector (the helper) can contain all the viral genes required for replication but contains a conditional gene defect in the packaging domain. The second vector of the system can contain only the ends of the viral genome, one or more engineered AAV capsid polynucleotides, and the native packaging recognition signal, which can allow selective packaged release from the cells (see e.g., Cideciyan et al. 2009. N Engl J Med. 361:725-727). Helper-dependent Adenoviral vector systems have been successful for gene delivery in several contexts (see e.g., Simonelli et al. 2010. J Am Soc Gene Ther. 18:643-650; Cideciyan et al. 2009. N Engl J Med. 361:725-727; Crane et al. 2012. Gene Ther. 19 (4): 443-452; Alba et al. 2005. Gene Ther. 12:18-S27; Croyle et al. 2005. Gene Ther. 12:579-587; Amalfitano et al. 1998. J. Virol. 72:926-933; and Morral et al. 1999. PNAS. 96:12816-12821). The techniques and vectors described in these publications can be adapted for inclusion and delivery of the engineered AAV capsid polynucleotides described herein. In some embodiments, the polynucleotide to be delivered via the viral particle produced from a helper-dependent adenoviral vector or system thereof can be up to about 38 kb. Thus, in some embodiments, a adenoviral vector can include a DNA polynucleotide to be delivered that can range in size from about 0.001 kb to about 37 kb (see e.g., Rosewell et al. 2011. J. Genet. Syndr. Gene Ther. Suppl. 5:001).

[0107] In some embodiments, the vector is a hybrid-adenoviral vector or system thereof. Hybrid adenoviral vectors are composed of the high transduction efficiency of a gene-deleted adenoviral vector and the long-term genome-integrating potential of adeno-associated, retroviruses, lentivirus, and transposon based-gene transfer. In some embodiments, such hybrid vector systems can result in stable transduction and limited integration site. See e.g., Balague et al. 2000. Blood. 95:820-828; Morral et al. 1998. Hum. Gene Ther. 9:2709-2716; Kubo and Mitani. 2003. J. Virol. 77 (5): 2964-2971; Zhang et al. 2013. PloS One. 8 (10) e76771; and Cooney et al. 2015. Mol. Ther. 23 (4): 667-674), whose techniques and vectors described therein can be modified and adapted for use in the engineered AAV capsid system of the present invention. In some embodiments, a hybrid-adenoviral vector can include one or more features of a retrovirus and/or an adeno-associated virus. In some embodiments the hybrid-adenoviral vector can include one or more features of a spuma retrovirus or foamy virus (FV). See e.g., Ehrhardt et al. 2007. Mol. Ther. 15:146-156 and Liu et al. 2007. Mol. Ther. 15:1834-1841, whose techniques and vectors described therein can be modified and adapted for use in the engineered AAV capsid system of the present invention. Advantages of using one or more features from the FVs in the hybrid-adenoviral vector or system thereof can include the ability of the viral particles produced therefrom to infect a broad range of cells, a large packaging capacity as compared to other retroviruses, and the ability to persist in quiescent (non-dividing) cells. See also e.g., Ehrhardt et al. 2007. Mol. Ther. 156:146-156 and Shuji et al. 2011. Mol. Ther. 19:76-82, whose techniques and vectors described therein can be modified and adapted for use in the engineered AAV capsid system of the present invention.

### Adeno Associated Vectors

[0108] In an embodiment, the engineered vector or system thereof can be an adeno-associated vector (AAV). See, e.g., West et al., Virology 160:38-47 (1987); U.S. Pat. No. 4,797,368; WO 93/24641; Kotin, Human Gene Therapy 5:793-801 (1994); and Muzyczka, J. Clin. Invest. 94:1351 (1994). Although similar to adenoviral vectors in some of their features, AAVs have some deficiency in their replication and/or pathogenicity and thus can be safer that adenoviral vectors. In some embodiments the AAV can integrate into a specific site on chromosome 19 of a human cell with no observable side effects. In some embodiments, the capacity of the AAV vector, system thereof, and/or AAV particles can be up to about 4.7 kb. The AAV vector or system thereof can include one or more engineered capsid polynucleotides described herein.

[0109] The AAV vector or system thereof can include one or more regulatory molecules. In some embodiments the regulatory molecules can be promoters, enhancers, repressors and the like, which are described in greater detail elsewhere herein. In some embodiments, the AAV vector or system thereof can include one or more polynucleotides that can encode one or more regulatory proteins. In some embodiments, the one or more regulatory proteins can be selected from Rep78, Rep68, Rep52, Rep40, variants thereof, and combinations thereof. In some embodiments, the promoter can be a tissue specific promoter as previously discussed. In some embodiments, the tissue specific promoter can drive expression of an engineered capsid AAV capsid polynucleotide described herein.

[0110] The AAV vector or system thereof can include one or more polynucleotides that can encode one or more capsid proteins, such as the engineered AAV capsid proteins described elsewhere herein. The engineered capsid proteins can be capable of assembling into a protein shell (an engineered capsid) of the AAV virus particle. The engineered capsid can have a cell-, tissue-, and/or organ-specific tropism.

[0111] In some embodiments, the AAV vector or system thereof can include one or more adenovirus helper factors or polynucleotides that can encode one or more adenovirus helper factors. Such adenovirus helper factors can include, but are not limited, E1A, E1B, E2A, E4ORF6, and VA RNAs. In some embodiments, a producing host cell line expresses one or more of the adenovirus helper factors. In some embodiments the cargo is encoded on a rAAV artificial genome operably linked to regulatory sequence and flanked by AAV ITR sequences.

[0112] The AAV vector or system thereof can be configured to produce AAV particles having a modified capsid comprising a n-mer as described herein that provides the AAV with a specific serotype that differs from an unmodified AAV capsid. In some embodiments, the serotype can be AAV-1, AAV-2, AAV-3, AAV-4, AAV-5, AAV-6, AAV-8, AAV-9 or any combinations thereof. In some embodiments, the AAV can be AAV1, AAV-2, AAV-5, AAV-9 or any combination thereof. One can select the AAV of the AAV with regard to the cells to be targeted; e.g., one can select AAV serotypes 1, 2, 5, 9 or a hybrid capsid AAV-1, AAV-2, AAV-5, AAV-9 or any combination thereof for targeting brain and/or neuronal cells; and one can select AAV-4 for targeting cardiac tissue; and one can select AAV-8 for delivery to the liver. Thus, in some embodiments, an AAV vector or system thereof capable of producing AAV particles capable of targeting the brain and/or neuronal cells can be configured to generate AAV particles having serotypes 1, 2, 5 or a hybrid capsid AAV-1, AAV-2, AAV-5 or any combination thereof. In some embodiments, an AAV vector or system thereof capable of producing AAV particles capable of targeting cardiac tissue can be configured to generate an AAV particle having an AAV-4 serotype. In some embodiments, an AAV vector or system thereof capable of producing AAV particles capable of targeting the liver can be configured to generate an AAV having an AAV-8 serotype. See also Srivastava. 2017. Curr. Opin. Virol. 21:75-80.

[0113] It will be appreciated that while the different serotypes can provide some level of cell, tissue, and/or organ specificity, each serotype still is multi-tropic and thus can result in tissue-toxicity if using that serotype to target a tissue that the serotype is less efficient in transducing. Thus, in addition to achieving some tissue targeting capacity via selecting an AAV of a particular serotype, it will be appreciated that the tropism of the AAV serotype can be modified by an engineered AAV capsid described herein. As described elsewhere herein, variants of wild-type AAV of any serotype can be generated via a method described herein and determined to have a particular cell-specific tropism, which can be the same or different as that of the reference wild-type AAV serotype. In some embodiments, the cell, tissue, and/or specificity of the wild-type serotype can be enhanced (e.g., made more selective or specific for a particular cell type that the serotype is already biased towards). For example, wild-type AAV-9 is biased towards muscle and brain in humans (see e.g., Srivastava. 2017. Curr. Opin. Virol. 21:75-80.) By including an engineered AAV capsid and/or capsid protein variant of wild-type AAV-9 as described herein, the bias for e.g., brain can be reduced or eliminated and/or the septicity increased such that the brain specificity appears reduced in comparison, thus enhancing the specificity for the muscle as compared to the wild-type AAV-9. As previously mentioned, inclusion of an engineered capsid and/or capsid protein variant of a wild-type AAV serotype can have a different tropism than the wild-type reference AAV serotype. For example, an engineered AAV capsid and/or capsid protein variant of AAV-9 can have specificity for a tissue other than muscle or brain in humans.

[0114] In some embodiments, the AAV vector is a hybrid AAV vector or system thereof. Hybrid AAVs are AAVs that include genomes with elements from one serotype that are packaged into a capsid derived from at least one different serotype. For example, if it is the rAAV2/5 that is to be produced, and if the production method is based on the helper-free, transient transfection method discussed above, the 1st plasmid and the 3rd plasmid (the adeno helper plasmid) will be the same as discussed for rAAV2 production. However, the 2nd plasmid, the pRepCap will be different. In this plasmid, called pRep2/Cap5, the Rep gene is still derived from AAV2, while the Cap gene is derived from AAV5. The production scheme is the same as the above-mentioned approach for AAV2 production. The resulting rAAV is called rAAV2/5, in which the genome is based on recombinant AAV2, while the capsid is based on AAV5. It is assumed the cell or tissue-tropism displayed by this AAV2/5 hybrid virus should be the same as that of AAV5. It will be appreciated that wild-type hybrid AAV particles suffer the same specificity issues as with the non-hybrid wild-type serotypes previously discussed.

[0115] Advantages achieved by the wild-type based hybrid AAV systems can be combined with the increased and customizable cell-specificity that can be achieved with the engineered AAV capsids can be combined by generating a hybrid AAV that can include an engineered AAV capsid described elsewhere herein. It will be appreciated that hybrid AAVs can contain an engineered AAV capsid containing a genome with elements from a different serotype than the reference wild-type serotype that the engineered AAV capsid is a variant of. For example, a hybrid AAV can be produced that includes an engineered AAV capsid that is a variant of an AAV-9 serotype that is used to package a genome that contains components (e.g., rep elements) from an AAV-2 serotype. As with wild-type based hybrid AAVs previously discussed, the tropism of the resulting AAV particle will be that of the engineered AAV capsid.

[0116] A tabulation of certain wild-type AAV serotypes as to these cells can be found in Grimm, D. et al, J. Virol. 82:5887-5911 (2008) reproduced below as Table A. Further tropism details can be found in Srivastava. 2017. Curr. Opin. Virol. 21:75-80 as previously discussed.

TABLE A

| Cell Line | AAV-1 | AAV-2 | AAV-3 | AAV-4 | AAV-5 | AAV-6 | AAV-8 | AAV-9 |
|---|---|---|---|---|---|---|---|---|
| Huh-7 | 13 | 100 | 2.5 | 0.0 | 0.1 | 10 | 0.7 | 0.0 |
| HEK293 | 25 | 100 | 2.5 | 0.1 | 0.1 | 5 | 0.7 | 0.1 |
| HeLa | 3 | 100 | 2.0 | 0.1 | 6.7 | 1 | 0.2 | 0.1 |
| HepG2 | 3 | 100 | 16.7 | 0.3 | 1.7 | 5 | 0.3 | ND |
| Hep1A | 20 | 100 | 0.2 | 1.0 | 0.1 | 1 | 0.2 | 0.0 |
| 911 | 17 | 100 | 11 | 0.2 | 0.1 | 17 | 0.1 | ND |
| CHO | 100 | 100 | 14 | 1.4 | 333 | 50 | 10 | 1.0 |
| COS | 33 | 100 | 33 | 3.3 | 5.0 | 14 | 2.0 | 0.5 |
| MeWo | 10 | 100 | 20 | 0.3 | 6.7 | 10 | 1.0 | 0.2 |
| NIH3T3 | 10 | 100 | 2.9 | 2.9 | 0.3 | 10 | 0.3 | ND |
| A549 | 14 | 100 | 20 | ND | 0.5 | 10 | 0.5 | 0.1 |
| HT1180 | 20 | 100 | 10 | 0.1 | 0.3 | 33 | 0.5 | 0.1 |
| Monocytes | 1111 | 100 | ND | ND | 125 | 1429 | ND | ND |
| Immature DC | 2500 | 100 | ND | ND | 222 | 2857 | ND | ND |
| Mature DC | 2222 | 100 | ND | ND | 333 | 3333 | ND | ND |

[0117] In example embodiments, the AAV vector or system thereof is AAV rh.74 or AAV rh.10.

[0118] In example embodiments, the AAV vector or system thereof is configured as a “gutless” vector, similar to that described in connection with a retroviral vector. In some embodiments, the “gutless” AAV vector or system thereof can have the cis-acting viral DNA elements involved in genome amplification and packaging in linkage with the heterologous sequences of interest (e.g., the engineered AAV capsid polynucleotide(s)).

### Vector Construction

[0119] The vectors described herein can be constructed using any suitable process or technique. In some embodiments, one or more suitable recombination and/or cloning methods or techniques can be used to the vector(s) described herein. Suitable recombination and/or cloning techniques and/or methods can include, but not limited to, those described in U.S. Application publication No. US 2004-0171156 A1. Other suitable methods and techniques are described elsewhere herein.

[0120] Construction of recombinant AAV vectors is described in a number of publications, including U.S. Pat. No. 5,173,414; Tratschin et al., Mol. Cell. Biol. 5:3251-3260 (1985); Tratschin, et al., Mol. Cell. Biol. 4:2072-2081 (1984); Hermonat & Muzyczka, PNAS 81:6466-6470 (1984); and Samulski et al., J. Virol. 63:03822-3828 (1989). Any of the techniques and/or methods can be used and/or adapted for constructing an AAV or other vector described herein. AAV vectors are discussed elsewhere herein.

[0121] In some embodiments, the vector can have one or more insertion sites, such as a restriction endonuclease recognition sequence (also referred to as a “cloning site”). In some embodiments, one or more insertion sites (e.g., about or more than about 1, 2, 3, 4, 5, 6, 7, 8, 9, 10, or more insertion sites) are located upstream and/or downstream of one or more sequence elements of one or more vectors.

[0122] Delivery vehicles, vectors, particles, nanoparticles, formulations and components thereof for expression of one or more elements of an engineered AAV capsid system described herein are as used in the foregoing documents, such as International Patent Application Publication WO 2014/093622 (PCT/US2013/074667) and are discussed in greater detail herein.

Virus Particle Production from Viral Vectors

### AAV Particle Production

[0123] There are two main strategies for producing AAV particles from AAV vectors and systems thereof, such as those described herein, which depend on how the adenovirus helper factors are provided (helper v. helper free). In some embodiments, a method of producing AAV particles from AAV vectors and systems thereof can include adenovirus infection into cell lines that stably harbor AAV replication and capsid encoding polynucleotides along with AAV vector containing the polynucleotide to be packaged and delivered by the resulting AAV particle (e.g., the engineered AAV capsid polynucleotide(s)). In some embodiments, a method of producing AAV particles from AAV vectors and systems thereof can be a “helper free” method, which includes co-transfection of an appropriate producing cell line with three vectors (e.g., plasmid vectors): (1) an AAV vector that contains a polynucleotide of interest between 2 ITRs; (2) a vector that carries the AAV Rep-Cap encoding polynucleotides (i.e., including the engineered AAV capsid polynucleotide); and (3) helper polynucleotides. One of skill in the art will appreciate various methods and variations thereof that are both helper and -helper free and as well as the different advantages of each system.

[0124] The engineered AAV vectors and systems thereof described herein can be produced by any of these methods.

### Vector and Virus Particle Delivery

[0125] A vector (including non-viral carriers) described herein can be introduced into host cells to thereby produce transcripts, proteins, or peptides, including fusion proteins or peptides encoded by nucleic acids as described herein (e.g., engineered AAV capsid system transcripts, proteins, enzymes, mutant forms thereof, fusion proteins thereof, etc.), and virus particles (such as from viral vectors and systems thereof).

[0126] One or more engineered rAAVs having an engineered capsid as described herein can be delivered using adeno associated virus (AAV), adenovirus or other plasmid or viral vector types as previously described, in particular, using formulations and doses from, for example, U.S. Pat. Nos. 8,454,972 (formulations, doses for adenovirus), 8,404,658 (formulations, doses for AAV) and 5,846,946 (formulations, doses for DNA plasmids) and from clinical trials and publications regarding the clinical trials involving lentivirus, AAV and adenovirus. For examples, for AAV, the route of administration, formulation and dose can be as in U.S. Pat. No. 8,454,972 and as in clinical trials involving AAV. For Adenovirus, the route of administration, formulation and dose can be as in U.S. Pat. No. 8,404,658 and as in clinical trials involving adenovirus.

[0127] For plasmid delivery, the route of administration, formulation and dose can be as in U.S. Pat. No. 5,846,946 and as in clinical studies involving plasmids. In some embodiments, doses can be based on or extrapolated to an average 70 kg individual (e.g., a male adult human), and can be adjusted for patients, subjects, mammals of different weight and species. Frequency of administration is within the ambit of the medical or veterinary practitioner (e.g., physician, veterinarian), depending on usual factors including the age, sex, general health, other conditions of the patient or subject and the particular condition or symptoms being addressed. The viral vectors can be injected into or otherwise delivered to the tissue or cell of interest.

[0128] In terms of in vivo delivery, AAV is advantageous over other viral vectors for a couple of reasons such as low toxicity (this may be due to the purification method not requiring ultra-centrifugation of cell particles that can activate the immune response) and a low probability of causing insertional mutagenesis because it doesn't integrate into the host genome.

[0129] The vector(s) and virus particles described herein can be delivered into a host cell in vitro, in vivo, and or ex vivo. Delivery can occur by any suitable method including, but not limited to, physical methods, chemical methods, and biological methods. Physical delivery methods are those methods that employ physical force to counteract the membrane barrier of the cells to facilitate intracellular delivery of the vector. Suitable physical methods include, but are not limited to, needles (e.g., injections), ballistic polynucleotides (e.g., particle bombardment, micro projectile gene transfer, and gene gun), electroporation, sonoporation, photoporation, magnetofection, hydroporation, and mechanical massage. Chemical methods are those methods that employ a chemical to elicit a change in the cells membrane permeability or other characteristic(s) to facilitate entry of the vector into the cell. For example, the environmental pH can be altered which can elicit a change in the permeability of the cell membrane. Biological methods are those that rely and capitalize on the host cell's biological processes or biological characteristics to facilitate transport of the vector (with or without a carrier) into a cell. For example, the vector and/or its carrier can stimulate an endocytosis or similar process in the cell to facilitate uptake of the vector into the cell.

[0130] Delivery of engineered AAV capsid system components (e.g., polynucleotides encoding engineered AAV capsid and/or capsid proteins) to cells via particles. The term “particle” as used herein, refers to any suitable sized particles for delivery of the engineered AAV capsid system components described herein. Suitable sizes include macro-, micro-, and nano-sized particles. In some embodiments, any of the of the engineered AAV capsid system components (e.g., polypeptides, polynucleotides, vectors and combinations thereof described herein) can be attached to, coupled to, integrated with, otherwise associated with one or more particles or component thereof as described herein. The particles described herein can then be administered to a cell or organism by an appropriate route and/or technique. In some embodiments, particle delivery can be selected and be advantageous for delivery of the polynucleotide or vector components. It will be appreciated that in embodiments, particle delivery can also be advantageous for other engineered capsid system molecules and formulations described elsewhere herein.

### Engineered Virus Particles Including an Engineered Viral (e.g., AAV) Capsid

[0131] Also described herein are engineered virus particles (also referred to here and elsewhere herein as “engineered viral particles” that can contain an engineered viral capsid (e.g., AAV capsid, referred to as “engineered AAV particles”) as described in detail elsewhere herein. It will be appreciated that the engineered AAV particles can be adenovirus-based particles, helper adenovirus-based particles, AAV-based particles, or hybrid adenovirus-based particles that contain at least one engineered AAV capsid proteins as previously described. An engineered AAV capsid is one that that contains one or more engineered AAV capsid proteins as are described elsewhere herein. In some embodiments, the engineered AAV particles can include 1-60 engineered AAV capsid proteins described herein. In some embodiments, the engineered AAV particles can contain 1, 2, 3, 4, 5, 6, 7, 8, 9, 10, 11, 12, 13, 14, 15, 16, 17, 18, 19, 20, 21, 22, 23, 24, 25, 26, 27, 28, 29, 30, 31, 32, 33, 34, 35, 36, 37, 38, 39, 40, 41, 42, 43, 44, 45, 46, 47, 48, 49, 50, 51, 52, 53, 54, 55, 56, 57, 58, 59, or 60 engineered capsid proteins. In some embodiments, the engineered AAV particles can contain 0-59 wild-type AAV capsid proteins. In some embodiments, the engineered AAV particles can contain 0, 1, 2, 3, 4, 5, 6, 7, 8, 9, 10, 11, 12, 13, 14, 15, 16, 17, 18, 19, 20, 21, 22, 23, 24, 25, 26, 27, 28, 29, 30, 31, 32, 33, 34, 35, 36, 37, 38, 39, 40, 41, 42, 43, 44, 45, 46, 47, 48, 49, 50, 51, 52, 53, 54, 55, 56, 57, 58, or 59 wild-type AAV capsid proteins. The engineered AAV particles can thus include one or more n-mer motifs as is previously described.

[0132] The engineered AAV particle can include one or more cargo polynucleotides. Cargo polynucleotides are discussed in greater detail elsewhere herein. Methods of making the engineered AAV particles from viral and non-viral vectors are described elsewhere herein. Formulations containing the engineered virus particles are described elsewhere herein.

### Example Cargos

[0133] The n-mers can be coupled to or otherwise associated with a cargo. Cargos can include any molecule that is capable of being coupled to or associated with the n-mers described herein. Cargos can include, without limitation, nucleotides, oligonucleotides, polynucleotides, amino acids, peptides, polypeptides, riboproteins, lipids, sugars, pharmaceutically active agents (e.g., drugs, imaging and other diagnostic agents, and the like), chemical compounds, and combinations thereof. In some embodiments, the cargo is DNA, RNA, amino acids, peptides, polypeptides, antibodies, aptamers, ribozymes, guide sequences for ribozymes that inhibit translation or transcription of essential tumor proteins and genes, hormones, immunomodulators, antipyretics, anxiolytics, antipsychotics, analgesics, antispasmodics, anti-inflammatoires, anti-histamines, anti-infectives, radiation sensitizers, chemotherapeutics, radioactive compounds, imaging agents, and combinations thereof.

[0134] In some embodiments, the cargo is capable of treating or preventing a neurological disease or disorder, details of which are described herein.

[0135] In some embodiments, the cargo is a morpholino, a peptide-linked morpholino, an antisense oligonucleotide, a PMO, a therapeutic transgene, a polynucleotide encoding a therapeutic polypeptide or peptide, a PPMO, one or more peptides, one or more polynucleotides encoding a CRISPR-Cas protein, a guide RNA, or both, a ribonucleoprotein, wherein the ribonucleoprotein comprises a CRISPR-Cas system molecule, a therapeutic transgene RNA, or other gene modifying or therapeutic RNA and/or protein, or any combination thereof.

[0136] In some embodiments, one or more n-mers described herein is directly attached to the cargo. In some embodiments, one or more n-mers described herein is indirectly coupled to the cargo, such as via a linker molecule. In some embodiments, one or more one or more n-mers described herein is coupled to associated with a polypeptide or other particle that is coupled to, attached to, encapsulates, and/or contains a cargo.

[0137] Exemplary particles include, without limitation, viral particles (e.g., viral capsids, which is inclusive of bacteriophage capsids), polysomes, liposomes, nanoparticles, microparticles, exosomes, micelles, and the like. The term “nanoparticle” as used herein includes a nanoscale deposit of a homogenous or heterogeneous material. Nanoparticles may be regular or irregular in shape and may be formed from a plurality of co-deposited particles that form a composite nanoscale particle. Nanoparticles may be generally spherical in shape or have a composite shape formed from a plurality of co-deposited generally spherical particles. Exemplary shapes for the nanoparticles include, but are not limited to, spherical, rod, elliptical, cylindrical, disc, and the like. In some embodiments, the nanoparticles have a substantially spherical shape.

### Cargo Polynucleotides

[0138] Cargos are also described elsewhere herein. In some embodiments, the cargo is a cargo polynucleotide that can be packaged into an engineered viral particle and subsequently delivered to a cell. In some embodiments, delivery is cell selective, e.g., neurons and glial cells of the central nervous system. The engineered viral (e.g., AAV) capsid polynucleotides, other viral (e.g., AAV) polynucleotide(s), and/or vector polynucleotides can contain one or more cargo polynucleotides. In some embodiments, the one or more cargo polynucleotides can be operably linked to the engineered viral (e.g., AAV) capsid polynucleotide(s) and can be part of the engineered viral (e.g., AAV) genome of the viral (e.g., AAV) system of the present invention. The cargo polynucleotides can be packaged into an engineered viral (e.g., AAV) particle, which can be delivered to, e.g., a cell. In some embodiments, the cargo polynucleotide can be capable of modifying a polynucleotide (e.g., gene or transcript) of a cell to which it is delivered. As used herein, “gene” can refer to a hereditary unit corresponding to a sequence of DNA that occupies a specific location on a chromosome and that contains the genetic instruction for a characteristic(s) or trait(s) in an organism. The term gene can refer to translated and/or untranslated regions of a genome. “Gene” can refer to the specific sequence of DNA that is transcribed into an RNA transcript that can be translated into a polypeptide or be a catalytic RNA molecule, including but not limited to, tRNA, siRNA, piRNA, miRNA, long-non-coding RNA and shRNA. Polynucleotide, gene, transcript, etc. modification includes all genetic engineering techniques including, but not limited to, gene editing as well as conventional recombinational gene modification techniques (e.g., whole or partial gene insertion, deletion, and mutagenesis (e.g., insertional and deletional mutagenesis) techniques.

[0139] In example embodiments, the cargo molecule is a polynucleotide that is or can encode a vaccine. In example embodiments, the cargo molecule is a polynucleotide encoding an antibody.

### Gene Modification Cargo Polynucleotides

[0140] In some embodiments, the cargo molecule can be a polynucleotide or polypeptide that can alone or when delivered as part of a system, whether or not delivered with other components of the system, operate to modify the genome, epigenome, and/or transcriptome of a cell to which it is delivered. Such systems include, but are not limited to, CRISPR-Cas systems. Other gene modification systems, e.g., TALENs, Zinc Finger nucleases, Cre-Lox, morpholinos, etc. are other non-limiting examples of gene modification systems whose one or more components can be delivered by the engineered viral (e.g., AAV) particles described herein.

[0141] In some embodiments, the cargo molecule is a gene editing system or component thereof. In some embodiments, the cargo molecule is a CRISPR-Cas system molecule or a component thereof. In some embodiments, the cargo molecule is a polynucleotide that encodes one or more components of a gene modification system (such as a CRISPR-Cas system). In some embodiments the cargo molecule is a gRNA. CRISPR-Cas system as used herein is intended to encompass by Class 1 and Class 2 CRISPR-Cas systems and derivatives of CRISPR-Cas systems such as base editors, prime editors, and CRISPR-associated transposases (CAST) systems.

[0142] In some embodiments, the cargo molecule can be a polynucleotide or polypeptide that can alone or when delivered as part of a system, whether or not delivered with other components of the system, operate to modify the genome, epigenome, and/or transcriptome of a cell to which it is delivered, is such that it treats or prevents a disease, a disorder, or a symptom thereof of a neurologic disease or disorder, and/or viruses (such as single stranded RNA viruses). In some embodiments, the cargo molecule, whether or not delivered with other components of the system, operate to modify the genome, epigenome, and/or transcriptome of a cell to which it is delivered, is such that it treats or prevents a neurological disease or disorder described further herein.

[0143] In some embodiments, the cargo molecule, whether or not delivered with other components of the system, operate to modify the genome, epigenome, and/or transcriptome of a cell to which it is delivered, is such that can modify the GAA gene, such as any of those described in US Pat. App. Pub. 20190284555, the contents of which are incorporated by reference as if expressed in their entirety herein and can be adapted for use with the present invention.

[0144] In some embodiments, the cargo molecule is an antisense oligomer or RNA molecule, such as those described in U.S. Pat. App. Pub. US20160251398, US20150267202, and US20180216111, the contents of which are incorporated by reference as if expressed in their entirety herein and can be adapted for use with the present invention.

[0145] In some embodiments, the cargo molecule can be a peptide-oligomer, conjugate as described in e.g., International Patent Application Publication WO2017106304A1, the contents of which are incorporated by reference as if expressed in their entirety herein and can be adapted for use with the present invention.

[0146] An embodiment of the invention encompasses methods of modifying a genomic locus of interest to change gene expression in a cell by introducing into the cell any of the compositions described herein.

[0147] An embodiment of the invention is that the above elements are comprised in a single composition or comprised in individual compositions. These compositions may advantageously be applied to a host to elicit a functional effect on the genomic level.

Engineered Cells and Organisms Expressing said Engineered AAV capsids

[0148] Described herein are engineered cells that can include one or more of the engineered AAV capsid polynucleotides, polypeptides, vectors, and/or vector systems. In some embodiments, one or more of the engineered AAV capsid polynucleotides can be expressed in the engineered cells. In some embodiments, the engineered cells can be capable of producing engineered AAV capsid proteins and/or engineered AAV capsid particles that are described elsewhere herein. Also described herein are modified or engineered organisms that can include one or more engineered cells described herein. The engineered cells can be engineered to express a cargo molecule (e.g., a cargo polynucleotide) dependently or independently of an engineered AAV capsid polynucleotide as described elsewhere herein.

[0149] A wide variety of animals, plants, algae, fungi, yeast, etc. and animal, plant, algae, fungus, yeast cell or tissue systems may be engineered to express one or more nucleic acid constructs of the engineered AAV capsid system described herein using various transformation methods mentioned elsewhere herein. This can produce organisms that can produce engineered AAV capsid particles, such as for production purposes, engineered AAV capsid design and/or generation, and/or model organisms. In some embodiments, the polynucleotide(s) encoding one or more components of the engineered AAV capsid system described herein can be stably or transiently incorporated into one or more cells of a plant, animal, algae, fungus, and/or yeast or tissue system. In some embodiments, one or more of engineered AAV capsid system polynucleotides are genomically incorporated into one or more cells of a plant, animal, algae, fungus, and/or yeast or tissue system. Further embodiments of the modified organisms and systems are described elsewhere herein. In some embodiments, one or more components of the engineered AAV capsid system described herein are expressed in one or more cells of the plant, animal, algae, fungus, yeast, or tissue systems.

### Engineered Cells

[0150] Described herein are various embodiments of engineered cells that can include one or more of the engineered AAV capsid system polynucleotides, polypeptides, vectors, and/or vector systems described elsewhere herein. In some embodiments, the cells can express one or more of the engineered AAV capsid polynucleotides and can produce one or more engineered AAV capsid particles, which are described in greater detail herein. Such cells are also referred to herein as “producer cells”. It will be appreciated that these engineered cells are different from “modified cells” described elsewhere herein in that the modified cells are not necessarily producer cells (i.e., they do not make engineered GTA delivery particles) unless they include one or more of the engineered AAV capsid polynucleotides, engineered AAV capsid vectors or other vectors described herein that render the cells capable of producing an engineered AAV capsid particle. Modified cells can be recipient cells of an engineered AAV capsid particles and can, in some embodiments, be modified by the engineered AAV capsid particle(s) and/or a cargo polynucleotide delivered to the recipient cell. Modified cells are discussed in greater detail elsewhere herein. The term modification can be used in connection with modification of a cell that is not dependent on being a recipient cell. For example, isolated cells can be modified prior to receiving an engineered AAV capsid molecule.

[0151] In an embodiment, the invention provides a non-human eukaryotic organism; for example, a multicellular eukaryotic organism, including a eukaryotic host cell containing one or more components of an engineered delivery system described herein according to any of the described embodiments. In other embodiments, the invention provides a eukaryotic organism; preferably a multicellular eukaryotic organism, comprising a eukaryotic host cell containing one or more components of an engineered delivery system described herein according to any of the described embodiments. In some embodiments, the organism is a host of AAV.

[0152] In particular embodiments, the plants, algae, fungi, yeast, etc., cells or parts obtained are transgenic plants, comprising an exogenous DNA sequence incorporated into the genome of all or part of the cells.

[0153] The engineered cell can be a prokaryotic cell. The prokaryotic cell can be bacterial cell. The prokaryotic cell can be an archaea cell. The bacterial cell can be any suitable bacterial cell. Suitable bacterial cells can be from the genus Escherichia, Bacillus, Lactobacillus, Rhodococcus, Rodhobacter, Synechococcus, Synechoystis, Pseudomonas, Psedoaltermonas, Stenotrophamonas, and Streptomyces Suitable bacterial cells include, but are not limited to Escherichia coli cells, Caulobacter crescentus cells, Rodhobacter sphaeroides cells, Psedoaltermonas haloplanktis cells. Suitable strains of bacterial include, but are not limited to BL21 (DE3), DL21 (DE3)-pLysS, BL21 Star-pLysS, BL21-SI, BL21-AI, Tuner, Tuner pLysS, Origami, Origami B pLysS, Rosetta, Rosetta pLysS, Rosetta-gami-pLysS, BL21 CodonPlus, AD494, BL2trxB, HMS174, NovaBlue (DE3), BLR, C41 (DE3), C43 (DE3), Lemo21 (DE3), Shuffle T7, ArcticExpress and ArticExpress (DE3).

[0154] The engineered cell can be a eukaryotic cell. The eukaryotic cells may be those of or derived from a particular organism, such as a plant or a mammal, including but not limited to human, or non-human eukaryote or animal or mammal as herein discussed, e.g., mouse, rat, rabbit, dog, livestock, or non-human mammal or primate. In some embodiments the engineered cell can be a cell line. Examples of cell lines include, but are not limited to, C8161, CCRF-CEM, MOLT, mIMCD-3, NHDF, HeLa-S3, Huh1, Huh4, Huh7, HUVEC, HASMC, HEKn, HEKa, MiaPaCell, Panc1, PC-3, TF1, CTLL-2, CIR, Rat6, CVI, RPTE, A10, T24, J82, A375, ARH-77, Calul, SW480, SW620, SKOV3, SK-UT, CaCo2, P388D1, SEM-K2, WEHI-231, HB56, TIB55, Jurkat, J45.01, LRMB, Bcl-1, BC-3, IC21, DLD2, Raw264.7, NRK, NRK-52E, MRC5, MEF, Hep G2, HeLa B, HeLa T4, COS, COS-1, COS-6, COS-M6A, BS-C-1 monkey kidney epithelial, BALB/3T3 mouse embryo fibroblast, 3T3 Swiss, 3T3-L1, 132-d5 human fetal fibroblasts; 10.1 mouse fibroblasts, 293-T, 3T3, 721, 9L, A2780, A2780ADR, A2780cis, A172, A20, A253, A431, A-549, ALC, B16, B35, BCP-1 cells, BEAS-2B, bEnd.3, BHK-21, BR 293, BxPC3, C3H-10T1/2, C6/36, Cal-27, CHO, CHO-7, CHO-IR, CHO-K1, CHO-K2, CHO-T, CHO Dhfr-/-, COR-L23, COR-L23/CPR, COR-L23/5010, COR-L23/R23, COS-7, COV-434, CML TI, CMT, CT26, D17, DH82, DU145, DuCaP, EL4, EM2, EM3, EMT6/AR1, EMT6/AR10.0, FM3, H1299, H69, HB54, HB55, HCA2, HEK-293, HeLa, Hepalclc7, HL-60, HMEC, HT-29, Jurkat, JY cells, K562 cells, Ku812, KCL22, KG1, KYO1, LNCap, Ma-Mel 1-48, MC-38, MCF-7, MCF-10A, MDA-MB-231, MDA-MB-468, MDA-MB-435, MDCK II, MDCK II, MOR/0.2R, MONO-MAC 6, MTD-1A, MyEnd, NCI-H69/CPR, NCI-H69/LX10, NCI-H69/LX20, NCI-H69/LX4, NIH-3T3, NALM-1, NW-145, OPCN/OPCT cell lines, Peer, PNT-1A/PNT 2, RenCa, RIN-5F, RMA/RMAS, Saos-2 cells, Sf-9, SkBr3, T2, T-47D, T84, THP1 cell line, U373, U87, U937, VCaP, Vero cells, WM39, WT-49, X63, YAC-1, YAR, and transgenic varieties thereof. Cell lines are available from a variety of sources known to those with skill in the art (see, e.g., the American Type Culture Collection (ATCC) (Manassas, Va.)).

[0155] In some embodiments, the engineered cell is a muscle cell (e.g., cardiac muscle, skeletal muscle, and/or smooth muscle), bone cell, blood cell, immune cell (including but not limited to B cells, macrophages, T-cells, CAR-T cells, and the like), kidney cells, bladder cells, lung cells, heart cells, liver cells, brain cells, neurons, skin cells, stomach cells, neuronal support cells, intestinal cells, epithelial cells, endothelial cells, stem or other progenitor cells, adrenal gland cells, cartilage cells, and combinations thereof.

[0156] In some embodiments, the engineered cell can be a fungus cell. As used herein, a “fungal cell” refers to any type of eukaryotic cell within the kingdom of fungi. Phyla within the kingdom of fungi include Ascomycota, Basidiomycota, Blastocladiomycota, Chytridiomycota, Glomeromycota, Microsporidia, and Neocallimastigomycota. Fungal cells may include yeasts, molds, and filamentous fungi. In some embodiments, the fungal cell is a yeast cell.

[0157] As used herein, the term “yeast cell” refers to any fungal cell within the phyla Ascomycota and Basidiomycota. Yeast cells may include budding yeast cells, fission yeast cells, and mold cells. Without being limited to these organisms, many types of yeast used in laboratory and industrial settings are part of the phylum Ascomycota. In some embodiments, the yeast cell is an S. cerevisiae, Kluyveromyces marxianus, or Issatchenkia orientalis cell. Other yeast cells may include without limitation Candida spp. (e.g., Candida albicans), Yarrowia spp. (e.g., Yarrowia lipolytica), Pichia spp. (e.g., Pichia pastoris), Kluyveromyces spp. (e.g., Kluyveromyces lactis and Kluyveromyces marxianus), Neurospora spp. (e.g., Neurospora crassa), Fusarium spp. (e.g., Fusarium oxysporum), and Issatchenkia spp. (e.g., Issatchenkia orientalis, a.k.a. Pichia kudriavzevii and Candida acidothermophilum). In some embodiments, the fungal cell is a filamentous fungal cell. As used herein, the term “filamentous fungal cell” refers to any type of fungal cell that grows in filaments, i.e., hyphae or mycelia. Examples of filamentous fungal cells may include without limitation Aspergillus spp. (e.g., Aspergillus niger), Trichoderma spp. (e.g., Trichoderma reesei), Rhizopus spp. (e.g., Rhizopus oryzae), and Mortierella spp. (e.g., Mortierella isabellina).

[0158] In some embodiments, the fungal cell is an industrial strain. As used herein, “industrial strain” refers to any strain of fungal cell used in or isolated from an industrial process, e.g., production of a product on a commercial or industrial scale. Industrial strain may refer to a fungal species that is typically used in an industrial process, or it may refer to an isolate of a fungal species that may be also used for non-industrial purposes (e.g., laboratory research). Examples of industrial processes may include fermentation (e.g., in production of food or beverage products), distillation, biofuel production, production of a compound, and production of a polypeptide. Examples of industrial strains can include, without limitation, JAY270 and ATCC4124.

[0159] In some embodiments, the fungal cell is a polyploid cell. As used herein, a “polyploid” cell may refer to any cell whose genome is present in more than one copy. A polyploid cell may refer to a type of cell that is naturally found in a polyploid state, or it may refer to a cell that has been induced to exist in a polyploid state (e.g., through specific regulation, alteration, inactivation, activation, or modification of meiosis, cytokinesis, or DNA replication). A polyploid cell may refer to a cell whose entire genome is polyploid, or it may refer to a cell that is polyploid in a particular genomic locus of interest.

[0160] In some embodiments, the fungal cell is a diploid cell. As used herein, a “diploid” cell may refer to any cell whose genome is present in two copies. A diploid cell may refer to a type of cell that is naturally found in a diploid state, or it may refer to a cell that has been induced to exist in a diploid state (e.g., through specific regulation, alteration, inactivation, activation, or modification of meiosis, cytokinesis, or DNA replication). For example, the S. cerevisiae strain S228C may be maintained in a haploid or diploid state. A diploid cell may refer to a cell whose entire genome is diploid, or it may refer to a cell that is diploid in a particular genomic locus of interest. In some embodiments, the fungal cell is a haploid cell. As used herein, a “haploid” cell may refer to any cell whose genome is present in one copy. A haploid cell may refer to a type of cell that is naturally found in a haploid state, or it may refer to a cell that has been induced to exist in a haploid state (e.g., through specific regulation, alteration, inactivation, activation, or modification of meiosis, cytokinesis, or DNA replication). For example, the S. cerevisiae strain S228C may be maintained in a haploid or diploid state. A haploid cell may refer to a cell whose entire genome is haploid, or it may refer to a cell that is haploid in a particular genomic locus of interest.

[0161] In some embodiments, the engineered cell is a cell obtained from a subject. In some embodiments, the subject is a healthy or non-diseased subject. In some embodiments, the subject is a subject with a desired physiological and/or biological characteristic such that when an engineered AAV capsid particle is produced it can package one or more cargo polynucleotides that can be related to the desired physiological and/or biological characteristic and/or capable of modifying the desired physiological and/or biological characteristic. Thus, the cargo polynucleotides of the produced engineered AAV capsid particle can be capable of transferring the desired characteristic to a recipient cell. In some embodiments, the cargo polynucleotides are capable of modifying a polynucleotide of the engineered cell such that the engineered cell has a desired physiological and/or biological characteristic.

[0162] In some embodiments, a cell transfected with one or more vectors described herein is used to establish a new cell line comprising one or more vector-derived sequences.

[0163] The engineered cells can be used to produce engineered viral (e.g., AAV) capsid polynucleotides, vectors, and/or particles. In some embodiments, the engineered viral (e.g., AAV) capsid polynucleotides, vectors, and/or particles are produced, harvested, and/or delivered to a subject in need thereof. In some embodiments, the engineered cells are delivered to a subject. Other uses for the engineered cells are described elsewhere herein. In some embodiments, the engineered cells can be included in formulations and/or kits described elsewhere herein.

[0164] The engineered cells can be stored short-term or long-term for use at a later time. Suitable storage methods are generally known in the art. Further, methods of restoring the stored cells for use (such as thawing, reconstitution, and otherwise stimulating metabolism in the engineered cell after storage) at a later time are also generally known in the art.

### Formulations

[0165] The compositions, polynucleotides, polypeptides, particles, cells, vector systems and combinations thereof described herein can be contained in a formulation, such as a pharmaceutical formulation. In some embodiments, the formulations can be used to generate polypeptides and other particles that include one or more CNS-specific n-mers described herein. In some embodiments, the formulations can be delivered to a subject in need thereof. In some embodiments, component(s) of the engineered AAV capsid system, engineered cells, engineered AAV capsid particles, and/or combinations thereof described herein can be included in a formulation that can be delivered to a subject or a cell. In some embodiments, the formulation is a pharmaceutical formulation. One or more of the polypeptides, polynucleotides, vectors, cells, and combinations thereof described herein can be provided to a subject in need thereof or a cell alone or as an active ingredient, such as in a pharmaceutical formulation. As such, also described herein are pharmaceutical formulations containing an amount of one or more of the polypeptides, polynucleotides, vectors, cells, or combinations thereof described herein. In some embodiments, the pharmaceutical formulation can contain an effective amount of the one or more of the polypeptides, polynucleotides, vectors, cells, and combinations thereof described herein. The pharmaceutical formulations described herein can be administered to a subject in need thereof or a cell.

[0166] In some embodiments, the amount of the one or more of the polypeptides, polynucleotides, vectors, cells, virus particles, nanoparticles, other delivery particles, and combinations thereof described herein contained in the pharmaceutical formulation can range from about 1 pg/kg to about 10 mg/kg based upon the bodyweight of the subject in need thereof or average bodyweight of the specific patient population to which the pharmaceutical formulation can be administered. The amount of the one or more of the polypeptides, polynucleotides, vectors, cells, and combinations thereof described herein in the pharmaceutical formulation can range from about 1 pg to about 10 g, from about 10 nL to about 10 ml. In embodiments where the pharmaceutical formulation contains one or more cells, the amount can range from about 1 cell to 1×10², 1×10³, 1×10⁴, 1×10⁵, 1×10⁶, 1×10⁷, 1×10⁸, 1×10⁹, 1×10¹⁰ or more cells. In embodiments where the pharmaceutical formulation contains one or more cells, the amount can range from about 1 cell to 1×10², 1×10³, 1×10⁴, 1×10⁵, 1×10⁶, 1×10⁷, 1×10⁸, 1×10⁹, 1×10¹⁰ or more cells per nL, μL, mL, or L.

[0167] In embodiments where engineered AAV capsid particles are included in the formulation, the formulation can contain 1 to 1×10¹, 1×10², 1×10³, 1×10⁴, 1×10⁵, 1×10⁶, 1×10⁷, 1×10⁸, 1×10⁹, 1×10¹⁰, 1×10¹¹, 1×10¹², 1×10¹³, 1×10¹⁴, 1×10¹⁵, 1×10¹⁶, 1×10¹⁷, 1×10¹⁸, 1×10¹⁹, or 1×10²⁰ transducing units (TU)/mL of the engineered AAV capsid particles. In some embodiments, the formulation can be 0.1 to 100 mL in volume and can contain 1 to 1×10¹, 1×10², 1×10³, 1×10⁴, 1×10⁵, 1×10⁶, 1×10⁷, 1×10⁸, 1×10⁹, 1×10¹⁰, 1×10¹¹, 1×10¹², 1×10¹³, 1×10¹⁴, 1×10¹⁵, 1×10¹⁶, 1×10¹⁷, 1×10¹⁸, 1×10¹⁹, or 1×10²⁰ transducing units (TU)/mL of the engineered AAV capsid particles.

### Pharmaceutically Acceptable Carriers and Auxiliary Ingredients and Agents

[0168] In embodiments, the pharmaceutical formulation containing an amount of one or more of the polypeptides, polynucleotides, vectors, cells, virus particles, nanoparticles, other delivery particles, and combinations thereof described herein can further include a pharmaceutically acceptable carrier. Suitable pharmaceutically acceptable carriers include, but are not limited to, water, salt solutions, alcohols, gum arabic, vegetable oils, benzyl alcohols, polyethylene glycols, gelatin, carbohydrates such as lactose, amylose or starch, magnesium stearate, talc, silicic acid, viscous paraffin, perfume oil, fatty acid esters, hydroxy methylcellulose, and polyvinyl pyrrolidone, which do not deleteriously react with the active composition.

[0169] The pharmaceutical formulations can be sterilized, and if desired, mixed with auxiliary agents, such as lubricants, preservatives, stabilizers, wetting agents, emulsifiers, salts for influencing osmotic pressure, buffers, coloring, flavoring and/or aromatic substances, and the like which do not deleteriously react with the active composition.

[0170] In addition to an amount of one or more of the polypeptides, polynucleotides, vectors, cells, engineered AAV capsid particles, nanoparticles, other delivery particles, and combinations thereof described herein, the pharmaceutical formulation can also include an effective amount of an auxiliary active agent, including but not limited to, polynucleotides, amino acids, peptides, polypeptides, antibodies, aptamers, ribozymes, hormones, immunomodulators, antipyretics, anxiolytics, antipsychotics, analgesics, antispasmodics, anti-inflammatoirenti-histamines, anti-infectives, chemotherapeutics, and combinations thereof.

[0171] Suitable hormones include, but are not limited to, amino-acid derived hormones (e.g., melatonin and thyroxine), small peptide hormones and protein hormones (e.g., thyrotropin-releasing hormone, vasopressin, insulin, growth hormone, luteinizing hormone, follicle-stimulating hormone, and thyroid-stimulating hormone), eicosanoids (e.g., arachidonic acid, lipoxins, and prostaglandins), and steroid hormones (e.g., estradiol, testosterone, tetrahydro testosterone Cortisol). Suitable immunomodulators include, but are not limited to, prednisone, azathioprine, 6-MP, cyclosporine, tacrolimus, methotrexate, interleukins (e.g., IL-2, IL-7, and IL-12), cytokines (e.g., interferons (e.g., IFN-α, IFN-β, IFN-ε, IFN-K, IFN-ω, and IFN-γ), granulocyte colony-stimulating factor, and imiquimod), chemokines (e.g., CCL3, CCL26 and CXCL7), cytosine phosphate-guanosine, oligodeoxynucleotides, glucans, antibodies, and aptamers).

[0172] Suitable antipyretics include, but are not limited to, non-steroidal anti-inflammatories (e.g., ibuprofen, naproxen, ketoprofen, and nimesulide), aspirin and related salicylates (e.g., choline salicylate, magnesium salicylate, and sodium salicylate), paracetamol/acetaminophen, metamizole, nabumetone, phenazone, and quinine.

[0173] Suitable anxiolytics include, but are not limited to, benzodiazepines (e.g., alprazolam, bromazepam, chlordiazepoxide, clonazepam, clorazepate, diazepam, flurazepam, lorazepam, oxazepam, temazepam, triazolam, and tofisopam), serotonergic antidepressants (e.g., selective serotonin reuptake inhibitors, tricyclic antidepressants, and monoamine oxidase inhibitors), mebicar, fabomotizole, selank, bromantane, emoxypine, azapirones, barbiturates, hydroxyzine, pregabalin, validol, and beta blockers.

[0174] Suitable antipsychotics include, but are not limited to, benperidol, bromoperidol, droperidol, haloperidol, moperone, pipamperone, timiperone, fluspirilene, penfluridol, pimozide, acepromazine, chlorpromazine, cyamemazine, dixyrazine, fluphenazine, levomepromazine, mesoridazine, perazine, pericyazine, perphenazine, pipotiazine, prochlorperazine, promazine, promethazine, prothipendyl, thioproperazine, thioridazine, trifluoperazine, triflupromazine, chlorprothixene, clopenthixol, flupentixol, thiothixene, zuclopenthixol, clotiapine, loxapine, prothipendyl, carpipramine, clocapramine, molindone, mosapramine, sulpiride, veralipride, amisulpride, amoxapine, aripiprazole, asenapine, clozapine, blonanserin, iloperidone, lurasidone, melperone, nemonapride, olanzapine, paliperidone, perospirone, quetiapine, remoxipride, risperidone, sertindole, trimipramine, ziprasidone, zotepine, alstonie, bifeprunox, bitopertin, brexpiprazole, cannabidiol, cariprazine, pimavanserin, pomaglumetad methionil, vabicaserin, xanomeline, and zicronapine.

[0175] Suitable analgesics include, but are not limited to, paracetamol/acetaminophen, nonsteroidal anti-inflammatoires (e.g., ibuprofen, naproxen, ketoprofen, and nimesulide), COX-2 inhibitors (e.g., rofecoxib, celecoxib, and etoricoxib), opioids (e.g., morphine, codeine, oxycodone, hydrocodone, dihydromorphine, pethidine, buprenorphine), tramadol, norepinephrine, flupirtine, nefopam, orphenadrine, pregabalin, gabapentin, cyclobenzaprine, scopolamine, methadone, ketobemidone, piritramide, and aspirin and related salicylates (e.g., choline salicylate, magnesium salicylate, and sodium salicylate).

[0176] Suitable antispasmodics include, but are not limited to, mebeverine, papaverine, cyclobenzaprine, carisoprodol, orphenadrine, tizanidine, metaxalone, methocarbamol, chlorzoxazone, baclofen, dantrolene, baclofen, tizanidine, and dantrolene. Suitable anti-inflammatories include, but are not limited to, prednisone, non-steroidal anti-inflammatoires (e.g., ibuprofen, naproxen, ketoprofen, and nimesulide), COX-2 inhibitors (e.g., rofecoxib, celecoxib, and etoricoxib), and immune selective anti-inflammatory derivatives (e.g., submandibular gland peptide-T and its derivatives)

[0177] Suitable anti-histamines include, but are not limited to, H1-receptor antagonists (e.g., acrivastine, azelastine, bilastine, brompheniramine, buclizine, bromodiphenhydramine, carbinoxamine, cetirizine, chlorpromazine, cyclizine, chlorpheniramine, clemastine, cyproheptadine, desloratadine, dexbrompheniramine, dexchlorpheniramine, dimenhydrinate, dimetindene, diphenhydramine, doxylamine, ebastine, embramine, fexofenadine, hydroxyzine, levocetirizine, loratadine, meclizine, mirtazapine, olopatadine, orphenadrine, phenindamine, pheniramine, phenyltoloxamine, promethazine, pyrilamine, quetiapine, rupatadine, tripelennamine, and triprolidine), H2-receptor antagonists (e.g., cimetidine, famotidine, lafutidine, nizatidine, ranitidine, and roxatidine), tritoqualine, catechin, cromoglicate, nedocromil, and p2-adrenergic agonists.

[0178] Suitable anti-infectives include, but are not limited to, amebicides (e.g., nitazoxanide, paromomycin, metronidazole, tinidazole, chloroquine, miltefosine, amphotericin b, and iodoquinol), aminoglycosides (e.g., paromomycin, tobramycin, gentamicin, amikacin, kanamycin, and neomycin), anthelmintics (e.g., pyrantel, mebendazole, ivermectin, praziquantel, albendazole, thiabendazole, oxamniquine), antifungals (e.g., azole antifungals (e.g., itraconazole, fluconazole, parconazole, ketoconazole, clotrimazole, miconazole, and voriconazole), echinocandins (e.g., caspofungin, anidulafungin, and micafungin), griseofulvin, terbinafine, flucytosine, and polyenes (e.g., nystatin, and amphotericin b), antimalarial agents (e.g., pyrimethamine/sulfadoxine, artemether/lumefantrine, atovaquone/proguanil, quinine, hydroxychloroquine, mefloquine, chloroquine, doxycycline, pyrimethamine, and halofantrine), antituberculosis agents (e.g., aminosalicylates (e.g., aminosalicylic acid), isoniazid/rifampin, isoniazid/pyrazinamide/rifampin, bedaquiline, isoniazid, ethambutol, rifampin, rifabutin, rifapentine, capreomycin, and cycloserine), antivirals (e.g., amantadine, rimantadine, abacavir/lamivudine, emtricitabine/tenofovir, cobicistat/elvitegravir/emtricitabine/tenofovir, efavirenz/emtricitabine/tenofovir, abacavir/lamivudine/zidovudine, lamivudine/zidovudine, emtricitabine/tenofovir, emtricitabine/lopinavir/ritonavir/tenofovir, interferon alfa-2v/ribavirin, peginterferon alfa-2b, maraviroc, raltegravir, dolutegravir, enfuvirtide, foscarnet, fomivirsen, oseltamivir, zanamivir, nevirapine, efavirenz, etravirine, rilpivirine, delavirdine, nevirapine, entecavir, lamivudine, adefovir, sofosbuvir, didanosine, tenofovir, abacavir, zidovudine, stavudine, emtricitabine, zalcitabine, telbivudine, simeprevir, boceprevir, telaprevir, lopinavir/ritonavir, boceprevir, darunavir, ritonavir, tipranavir, atazanavir, nelfinavir, amprenavir, indinavir, saquinavir, ribavirin, valacyclovir, acyclovir, famciclovir, ganciclovir, and valganciclovir), carbapenems (e.g., doripenem, meropenem, ertapenem, and cilastatin/imipenem), cephalosporins (e.g., cefadroxil, cephradine, cefazolin, cephalexin, cefepime, cefazoline, loracarbef, cefotetan, cefuroxime, cefprozil, loracarbef, cefoxitin, cefaclor, ceftibuten, ceftriaxone, cefotaxime, cefpodoxime, cefdinir, cefixime, cefditoren, ceftizoxime, and ceftazidime), glycopeptide antibiotics (e.g., vancomycin, dalbavancin, oritavancin, and telavancin), glycylcyclines (e.g., tigecycline), leprostatics (e.g., clofazimine and thalidomide), lincomycin and derivatives thereof (e.g., clindamycin and lincomycin), macrolides and derivatives thereof (e.g., telithromycin, fidaxomicin, erythromycin, azithromycin, clarithromycin, dirithromycin, and troleandomycin), linezolid, sulfamethoxazole/trimethoprim, rifaximin, chloramphenicol, Fosfomycin, metronidazole, aztreonam, bacitracin, penicillin (amoxicillin, ampicillin, bacampicillin, carbenicillin, piperacillin, ticarcillin, amoxicillin/clavulanate, ampicillin/sulbactam, piperacillin/tazobactam, clavulanate/ticarcillin, penicillin, procaine penicillin, oxacillin, dicloxacillin, and nafcillin), quinolones (e.g., lomefloxacin, norfloxacin, ofloxacin, gatifloxacin, moxifloxacin, ciprofloxacin, levofloxacin, gemifloxacin, moxifloxacin, cinoxacin, nalidixic acid, enoxacin, grepafloxacin, gatifloxacin, trovafloxacin, and sparfloxacin), sulfonamides (e.g., sulfamethoxazole/trimethoprim, sulfasalazine, and sulfisoxazole), tetracyclines (e.g., doxycycline, demeclocycline, minocycline, doxycycline/salicylic acid, doxycycline/omega-3 polyunsaturated fatty acids, and tetracycline), and urinary anti-infectives (e.g., nitrofurantoin, methenamine, Fosfomycin, cinoxacin, nalidixic acid, trimethoprim, and methylene blue).

[0179] Suitable chemotherapeutics include, but are not limited to, paclitaxel, brentuximab vedotin, doxorubicin, 5-FU (fluorouracil), everolimus, pemetrexed, melphalan, pamidronate, anastrozole, exemestane, nelarabine, ofatumumab, bevacizumab, belinostat, tositumomab, carmustine, bleomycin, bosutinib, busulfan, alemtuzumab, irinotecan, vandetanib, bicalutamide, lomustine, daunorubicin, clofarabine, cabozantinib, dactinomycin, ramucirumab, cytarabine, Cytoxan, cyclophosphamide, decitabine, dexamethasone, docetaxel, hydroxyurea, dacarbazine, leuprolide, epirubicin, oxaliplatin, asparaginase, estramustine, cetuximab, vismodegib, asparaginase Erwinia chrysanthemi, amifostine, etoposide, flutamide, toremifene, fulvestrant, letrozole, degarelix, pralatrexate, methotrexate, floxuridine, obinutuzumab, gemcitabine, afatinib, imatinib mesylate, carmustine, eribulin, trastuzumab, altretamine, topotecan, ponatinib, idarubicin, ifosfamide, ibrutinib, axitinib, interferon alfa-2a, gefitinib, romidepsin, ixabepilone, ruxolitinib, cabazitaxel, ado-trastuzumab emtansine, carfilzomib, chlorambucil, sargramostim, cladribine, mitotane, vincristine, procarbazine, megestrol, trametinib, mesna, strontium-89 chloride, mechlorethamine, mitomycin, busulfan, gemtuzumab ozogamicin, vinorelbine, filgrastim, pegfilgrastim, sorafenib, nilutamide, pentostatin, tamoxifen, mitoxantrone, pegaspargase, denileukin diftitox, alitretinoin, carboplatin, pertuzumab, cisplatin, pomalidomide, prednisone, aldesleukin, mercaptopurine, zoledronic acid, lenalidomide, rituximab, octreotide, dasatinib, regorafenib, histrelin, sunitinib, siltuximab, omacetaxine, thioguanine (tioguanine), dabrafenib, erlotinib, bexarotene, temozolomide, thiotepa, thalidomide, Bacillus Calmette-Guerin (BCG), temsirolimus, bendamustine hydrochloride, triptorelin, arsenic trioxide, lapatinib, valrubicin, panitumumab, vinblastine, bortezomib, tretinoin, azacitidine, pazopanib, teniposide, leucovorin, crizotinib, capecitabine, enzalutamide, ipilimumab, goserelin, vorinostat, idelalisib, ceritinib, abiraterone, epothilone, tafluposide, azathioprine, doxifluridine, vindesine, and all-trans retinoic acid.

[0180] In embodiments where there is an auxiliary active agent contained in the pharmaceutical formulation in addition to the one or more of the polypeptides, polynucleotides, CRISPR-Cas complexes, vectors, cells, virus particles, nanoparticles, other delivery particles, and combinations thereof described herein, amount, such as an effective amount, of the auxiliary active agent will vary depending on the auxiliary active agent. In some embodiments, the amount of the auxiliary active agent ranges from 0.001 micrograms to about 1 milligram. In other embodiments, the amount of the auxiliary active agent ranges from about 0.01 IU to about 1000 IU. In further embodiments, the amount of the auxiliary active agent ranges from 0.001 mL to about 1 mL. In yet other embodiments, the amount of the auxiliary active agent ranges from about 1% w/w to about 50% w/w of the total pharmaceutical formulation. In additional embodiments, the amount of the auxiliary active agent ranges from about 1% v/v to about 50% v/v of the total pharmaceutical formulation. In still other embodiments, the amount of the auxiliary active agent ranges from about 1% w/v to about 50% w/v of the total pharmaceutical formulation.

### Dosage Forms

[0181] In some embodiments, the pharmaceutical formulations described herein may be in a dosage form. The dosage forms can be adapted for administration by any appropriate route. Appropriate routes include, but are not limited to, oral (including buccal or sublingual), rectal, epidural, intracranial, intraocular, inhaled, intranasal, topical (including buccal, sublingual, or transdermal), vaginal, intraurethral, parenteral, intracranial, subcutaneous, intramuscular, intravenous, intraperitoneal, intradermal, intraosseous, intracardiac, intraarticular, intracavernous, intrathecal, intravitreal, intracerebral, gingival, subgingival, intracerebroventricular, and intradermal. Such formulations may be prepared by any method known in the art.

[0182] Dosage forms adapted for oral administration can be discrete dosage units such as capsules, pellets or tablets, powders or granules, solutions, or suspensions in aqueous or non-aqueous liquids; edible foams or whips, or in oil-in-water liquid emulsions or water-in-oil liquid emulsions. In some embodiments, the pharmaceutical formulations adapted for oral administration also include one or more agents which flavor, preserve, color, or help disperse the pharmaceutical formulation. Dosage forms prepared for oral administration can also be in the form of a liquid solution that can be delivered as foam, spray, or liquid solution. In some embodiments, the oral dosage form can contain about 1 ng to 1000 g of a pharmaceutical formulation containing a therapeutically effective amount or an appropriate fraction thereof of the targeted effector fusion protein and/or complex thereof or composition containing the one or more of the polypeptides, polynucleotides, vectors, cells, and combinations thereof described herein. The oral dosage form can be administered to a subject in need thereof.

[0183] Where appropriate, the dosage forms described herein can be microencapsulated.

[0184] The dosage form can also be prepared to prolong or sustain the release of any ingredient. In some embodiments, the one or more of the polypeptides, polynucleotides, vectors, cells, and combinations thereof described herein can be the ingredient whose release is delayed. In other embodiments, the release of an optionally included auxiliary ingredient is delayed. Suitable methods for delaying the release of an ingredient include, but are not limited to, coating or embedding the ingredients in material in polymers, wax, gels, and the like. Delayed release dosage formulations can be prepared as described in standard references such as “Pharmaceutical dosage form tablets,” eds. Liberman et. al. (New York, Marcel Dekker, Inc., 1989), “Remington—The science and practice of pharmacy”, 20th ed., Lippincott Williams & Wilkins, Baltimore, MD, 2000, and “Pharmaceutical dosage forms and drug delivery systems”, 6th Edition, Ansel et al., (Media, PA: Williams and Wilkins, 1995). These references provide information on excipients, materials, equipment, and processes for preparing tablets and capsules and delayed release dosage forms of tablets and pellets, capsules, and granules. The delayed release can be anywhere from about an hour to about 3 months or more.

[0185] Examples of suitable coating materials include, but are not limited to, cellulose polymers such as cellulose acetate phthalate, hydroxypropyl cellulose, hydroxypropyl methylcellulose, hydroxypropyl methylcellulose phthalate, and hydroxypropyl methylcellulose acetate succinate; polyvinyl acetate phthalate, acrylic acid polymers and copolymers, and methacrylic resins that are commercially available under the trade name EUDRAGIT® (Roth Pharma, Westerstadt, Germany), zein, shellac, and polysaccharides.

[0186] Coatings may be formed with a different ratio of water-soluble polymer, water insoluble polymers, and/or pH dependent polymers, with or without water insoluble/water soluble non-polymeric excipient, to produce the desired release profile. The coating is either performed on the dosage form (matrix or simple) which includes, but is not limited to, tablets (compressed with or without coated beads), capsules (with or without coated beads), beads, particle compositions, “ingredient as is” formulated as, but not limited to, suspension form or as a sprinkle dosage form.

[0187] Dosage forms adapted for topical administration can be formulated as ointments, creams, suspensions, lotions, powders, solutions, pastes, gels, sprays, aerosols, or oils. In some embodiments for treatments of the eye or other external tissues, for example the mouth or the skin, the pharmaceutical formulations are applied as a topical ointment or cream. When formulated in an ointment, the one or more of the polypeptides, polynucleotides, vectors, cells, and combinations thereof described herein can be formulated with a paraffinic or water-miscible ointment base. In some embodiments, the active ingredient can be formulated in a cream with an oil-in-water cream base or a water-in-oil base. Dosage forms adapted for topical administration in the mouth include lozenges, pastilles, and mouth washes.

[0188] Dosage forms adapted for nasal or inhalation administration include aerosols, solutions, suspension drops, gels, or dry powders. In some embodiments, the one or more of the polypeptides, polynucleotides, vectors, cells, and combinations thereof described herein is contained in a dosage form adapted for inhalation is in a particle-size-reduced form that is obtained or obtainable by micronization. In some embodiments, the particle size of the size reduced (e.g., micronized) compound or salt or solvate thereof, is defined by a D50 value of about 0.5 to about 10 microns as measured by an appropriate method known in the art. Dosage forms adapted for administration by inhalation also include particle dusts or mists. Suitable dosage forms wherein the carrier or excipient is a liquid for administration as a nasal spray or drops include aqueous or oil solutions/suspensions of an active ingredient (e.g., the one or more of the polypeptides, polynucleotides, vectors, cells, and combinations thereof described herein and/or auxiliary active agent), which may be generated by various types of metered dose pressurized aerosols, nebulizers, or insufflators.

[0189] In some embodiments, the dosage forms can be aerosol formulations suitable for administration by inhalation. In some of these embodiments, the aerosol formulation can contain a solution or fine suspension of the one or more of the polypeptides, polynucleotides, vectors, cells, and combinations thereof described herein and a pharmaceutically acceptable aqueous or non-aqueous solvent. Aerosol formulations can be presented in single or multi-dose quantities in sterile form in a sealed container. For some of these embodiments, the sealed container is a single dose or multi-dose nasal, or an aerosol dispenser fitted with a metering valve (e.g., metered dose inhaler), which is intended for disposal once the contents of the container have been exhausted.

[0190] Where the aerosol dosage form is contained in an aerosol dispenser, the dispenser contains a suitable propellant under pressure, such as compressed air, carbon dioxide, or an organic propellant, including but not limited to a hydrofluorocarbon. The aerosol formulation dosage forms in other embodiments are contained in a pump-atomizer. The pressurized aerosol formulation can also contain a solution or a suspension of one or more of the polypeptides, polynucleotides, vectors, cells, and combinations thereof described herein. In further embodiments, the aerosol formulation can also contain co-solvents and/or modifiers incorporated to improve, for example, the stability and/or taste and/or fine particle mass characteristics (amount and/or profile) of the formulation. Administration of the aerosol formulation can be once daily or several times daily, for example 2, 3, 4, or 8 times daily, in which 1, 2, or 3 doses are delivered each time.

[0191] For some dosage forms suitable and/or adapted for inhaled administration, the pharmaceutical formulation is a dry powder inhalable formulation. In addition to the one or more of the polypeptides, polynucleotides, vectors, cells, and combinations thereof described herein, an auxiliary active ingredient, and/or pharmaceutically acceptable salt thereof, such a dosage form can contain a powder base such as lactose, glucose, trehalose, mannitol, and/or starch. In some of these embodiments, the one or more of the polypeptides, polynucleotides, vectors, cells, and combinations thereof described herein is in a particle-size reduced form. In further embodiments, a performance modifier, such as L-leucine or another amino acid, cellobiose octaacetate, and/or metals salts of stearic acid, such as magnesium or calcium stearate.

[0192] In some embodiments, the aerosol dosage forms can be arranged so that each metered dose of aerosol contains a predetermined amount of an active ingredient, such as the one or more of the one or more of the polypeptides, polynucleotides, vectors, cells, and combinations thereof described herein.

[0193] Dosage forms adapted for parenteral administration and/or adapted for any type of injection (e.g., intravenous, intraperitoneal, subcutaneous, intramuscular, intradermal, intraosseous, epidural, intracardiac, intraarticular, intracavernous, gingival, subgingival, intrathecal, intravitreal, intracerebral, and intracerebroventricular) can include aqueous and/or non-aqueous sterile injection solutions, which can contain anti-oxidants, buffers, bacteriostats, solutes that render the composition isotonic with the blood of the subject, and aqueous and non-aqueous sterile suspensions, which can include suspending agents and thickening agents. The dosage forms adapted for parenteral administration can be presented in a single-unit dose or multi-unit dose containers, including but not limited to sealed ampoules or vials. The doses can be lyophilized and resuspended in a sterile carrier to reconstitute the dose prior to administration. Extemporaneous injection solutions and suspensions can be prepared in some embodiments, from sterile powders, granules, and tablets.

[0194] Dosage forms adapted for ocular administration can include aqueous and/or nonaqueous sterile solutions that can optionally be adapted for injection, and which can optionally contain anti-oxidants, buffers, bacteriostats, solutes that render the composition isotonic with the eye or fluid contained therein or around the eye of the subject, and aqueous and nonaqueous sterile suspensions, which can include suspending agents and thickening agents.

[0195] For some embodiments, the dosage form contains a predetermined amount of the one or more of the polypeptides, polynucleotides, vectors, cells, and combinations thereof described herein per unit dose. In some embodiments, the predetermined amount of the such unit doses may therefore be administered once or more than once a day. Such pharmaceutical formulations may be prepared by any of the methods well known in the art.

### Kits

[0196] Also described herein are kits that contain one or more of the one or more of the compositions, polypeptides, polynucleotides, vectors, cells, or other components described herein and combinations thereof and pharmaceutical formulations described herein. In embodiments, one or more of the polypeptides, polynucleotides, vectors, cells, and combinations thereof described herein can be presented as a combination kit. As used herein, the terms “combination kit” or “kit of parts” refers to the compounds, or formulations and additional components that are used to package, screen, test, sell, market, deliver, and/or administer the combination of elements or a single element, such as the active ingredient, contained therein. Such additional components include but are not limited to, packaging, syringes, blister packages, bottles, and the like. The combination kit can contain one or more of the components (e.g., one or more of the one or more of the polypeptides, polynucleotides, vectors, cells, and combinations thereof) or formulation thereof can be provided in a single formulation (e.g., a liquid, lyophilized powder, etc.), or in separate formulations. The separate components or formulations can be contained in a single package or in separate packages within the kit. The kit can also include instructions in a tangible medium of expression that can contain information and/or directions regarding the content of the components and/or formulations contained therein, safety information regarding the content of the components(s) and/or formulation(s) contained therein, information regarding the amounts, dosages, indications for use, screening methods, component design recommendations and/or information, recommended treatment regimen(s) for the components(s) and/or formulations contained therein. As used herein, “tangible medium of expression” refers to a medium that is physically tangible or accessible and is not a mere abstract thought or an unrecorded spoken word. “Tangible medium of expression” includes, but is not limited to, words on a cellulosic or plastic material, or data stored in a suitable computer readable memory form. The data can be stored on a unit device, such as a flash memory drive or CD-ROM or on a server that can be accessed by a user via, e.g., a web interface.

[0197] In one embodiment, the invention provides a kit comprising one or more of the components described herein. In some embodiments, the kit comprises a vector system and instructions for using the kit. In some embodiments, the vector system includes a regulatory element operably linked to one or more engineered polynucleotides, such as those containing a selective n-mer, as described elsewhere herein and, optionally, a cargo molecule, which can optionally be operably linked to a regulatory element. The one or more engineered polynucleotides such as those containing a selective n-mer, as described elsewhere herein and, can be included on the same or different vectors as the cargo molecule in embodiments containing a cargo molecule within the kit.

[0198] In some embodiments, the kit comprises a vector system and instructions for using the kit. In some embodiments, the vector system comprises (a) a first regulatory element operably linked to a direct repeat sequence and one or more insertion sites for inserting one or more guide sequences up- or downstream (whichever applicable) of the direct repeat sequence, wherein when expressed, the guide sequence directs sequence-specific binding of a Cas9 CRISPR complex to a target sequence in a eukaryotic cell, wherein the Cas9 CRISPR complex comprises a Cas9 enzyme complexed with the guide sequence that is hybridized to the target sequence; and/or (b) a second regulatory element operably linked to an enzyme-coding sequence encoding said Cas9 enzyme comprising a nuclear localization sequence. Where applicable, a tracr sequence may also be provided. In some embodiments, the kit comprises components (a) and (b) located on the same or different vectors of the system. In some embodiments, component (a) further comprises two or more guide sequences operably linked to the first regulatory element, wherein when expressed, each of the two or more guide sequences direct sequence specific binding of a CRISPR complex to a different target sequence in a eukaryotic cell. In some embodiments, the Cas9 enzyme comprises one or more nuclear localization sequences of sufficient strength to drive accumulation of said CRISPR enzyme in a detectable amount in the nucleus of a eukaryotic cell. In some embodiments, the CRISPR enzyme is a type V or VI CRISPR system enzyme. In some embodiments, the CRISPR enzyme is a Cas9 enzyme. In some embodiments, the Cas9 enzyme is derived from Francisella tularensis 1, Francisella tularensis subsp. novicida, Prevotella albensis, Lachnospiraceae bacterium MC2017 1, Butyrivibrio proteoclasticus, Peregrinibacteria bacterium GW2011 GWA2 33_10, Parcubacteria bacterium GW2011_GWC2_44_17, Smithella sp. SCADC, Acidaminococcus sp. BV3L6, Lachnospiraceae bacterium MA2020, Candidatus Methanoplasma termitum, Eubacterium eligens, Moraxella bovoculi 237, Leptospira inadai, Lachnospiraceae bacterium ND2006, Porphyromonas crevioricanis 3, Prevotella disiens, or Porphyromonas macacae Cas9 (e.g., modified to have or be associated with at least one DD), and may include further alteration or mutation of the Cas9, and can be a chimeric Cas9. In some embodiments, the DD-CRISPR enzyme is codon-optimized for expression in a eukaryotic cell. In some embodiments, the DD-CRISPR enzyme directs cleavage of one or two strands at the location of the target sequence. In some embodiments, the DD-CRISPR enzyme lacks or substantially DNA strand cleavage activity (e.g., no more than 5% nuclease activity as compared with a wild-type enzyme or enzyme not having the mutation or alteration that decreases nuclease activity). In some embodiments, the first regulatory element is a polymerase III promoter. In some embodiments, the second regulatory element is a polymerase II promoter. In some embodiments, the guide sequence is at least 16, 17, 18, 19, 20, 25 nucleotides, or between 16-30, or between 16-25, or between 16-20 nucleotides in length.

### Methods of Use for Delivery of Cargo to CNS

[0199] The compositions including one or more of the cell-selective targeting moieties, engineered AAV capsid system polynucleotides, polypeptides, vector(s), engineered cells, engineered AAV capsid particles can be used generally to package and/or deliver one or more cargos to neuron and glial cells of the CNS. In some embodiments, delivery is done in cell-selective manner based upon the selectivity of the targeting moiety. In some embodiments this is conferred by the tropism of the engineered AAV capsid, which can be influenced at least in part by the inclusion of one or n-mer motifs described elsewhere herein. In some embodiments, compositions including one or more of the CNS endothelial targeting moieties, engineered AAV capsid particles, can be administered to a subject or a cell, tissue, and/or organ and facilitate the transfer and/or integration of the cargo to the recipient cell. In other embodiments, engineered cells capable of producing compositions, such as polypeptides and other particles (e.g., engineered AAV capsids and viral particles), containing one or more of the targeting moieties can be generated from the polynucleotides, vectors, and vector systems etc., described herein. This includes without limitation, the engineered AAV capsid system molecules (e.g., polynucleotides, vectors, and vector systems, etc.). In some embodiments, the polynucleotides, vectors, and vector systems etc., described herein capable of generating the compositions, such as polypeptides and other particles (e.g., engineered AAV capsids and viral particles), containing one or more of the targeting moieties can be delivered to a cell or tissue, in vivo, ex vivo, or in vitro. In some embodiments, when delivered to a subject, the composition can transform a subject's cell in vivo or ex vivo to produce an engineered cell that can be capable of making a composition described herein that contains one or more of the cell-selective targeting moieties described herein, including but not limited to the engineered AAV capsid particles, which can be released from the engineered cell and deliver cargo molecule(s) to a recipient cell in vivo or produce personalized engineered compositions (e.g., AAV capsid particles) for reintroduction into the subject from which the recipient cell was obtained.

[0200] In some embodiments, an engineered cell can be delivered to a subject, where it can release produced compositions of the present invention (including but not limited to engineered AAV capsid particles) such that they can then deliver a cargo (e.g., a cargo polynucleotide(s)) to a recipient cell. These general processes can be used in a variety of ways to treat and/or prevent disease or a symptom thereof in a subject, generate model cells, generate modified organisms, provide cell selection and screening assays, in bioproduction, and in other various applications.

[0201] In some embodiments, the compositions, such as polypeptides and other particles (e.g., engineered AAV capsids and viral particles), containing one or more of the targeting moieties can be delivered to neural cells of the CNS. In another example embodiment, the compositions containing one or more targeting moieties can be delivered to glial cells of the CNS.

[0202] In some embodiments, the engineered AAV capsid polynucleotides, vectors, and systems thereof can be used to generate engineered AAV capsid variant libraries that can be mined for variants with a desired cell-selectivity. The description provided herein as supported by the various Examples can demonstrate that one having a desired cell-selectivity in mind could utilize the present invention as described herein to obtain a capsid with the desired cell-selectivity.

### Methods of Treatment

[0203] Provided herein are methods for treating a disease or disorder, the method comprising administering to a subject in need thereof, compositions as disclosed herein to cells of the CNS. In an aspect, the compositions used in methods disclosed herein are capable of increasing transduction of neurons and/or glial cells of the CNS, allowing for delivery of cargo and therapeutics directly to such cell types. In embodiments, a method is disclosed wherein the cargo is one or more polypeptides.

### Diseases or Disorders

[0204] Generally, the compositions described herein can be used in a therapy for treating or preventing a CNS disease, disorder, or a symptom thereof. It will be appreciated that a CNS disease or disorder refers to any disease or disorder whose pathology involves or affects one or more cell types of the central nervous system. In some embodiments, the CNS disease or disorder is one whose primary pathology involves one or more cell types of the CNS. In some embodiments, one or more other cell types outside of the CNS are involved in the pathology of the CNS disease, such as a muscle cell or a peripheral nervous system cell. In some embodiments, the CNS disease or disorder can be caused by one or more genetic abnormalities. In some embodiments, the CNS disease or disorder is not caused by a genetic abnormality. Non-genetic causes of diseases include infection, cancer, physical trauma and others that will be appreciated by those of skill in the art. It also will be apricated that gene modification approaches to treating disease can be applied to treat and/or prevent both genetic diseases and non-genetic diseases. For example, in the case of non-genetic diseases, a gene therapy approach can be used to modify the cause of the non-genetic disease (e.g., a cancer or infectious organism) such that the cause is no longer disease causing (e.g., by eliminating or rendering non-functional the cancer cells or infectious organism).

[0205] Exemplary CNS diseases and disorders include, without limitation, Friedreich's Ataxia, Dravet Syndrome, Spinocerebellar Ataxia Type 3, Niemann Pick Type C, Huntington's Disease, Pompe Disease, Myotonic Dystrophy Type 1, Glut1 Deficiency Syndrome (De Vivo Syndrome), Tay-Sachs, Spinal Muscular Atrophy, Alzheimer's disease, Amyotrophic lateral sclerosis (ALS), Danon disease, Rett Syndrome, Angleman Syndrome, infantile neuronal dystorpy, Gaucher's disease, Krabbe disease, metachromatic leukodystrophy, Salla disease, Farber disease or Spinal Musular Atrophy with progressive myoclonic Epilepsy (also reffered to as Jankovic-Rivera syndrome, Unverricht-Lundborg disease, AADC deficiency, Parkinson's disease, Batten disease, a neuronal ceroid lipofuscinosis disease, giant axonal neuropathy, a mucopolysaccharidosis disease (e.g., Hurler syndrome, MPS III A-D), neurofibromatosis, a spinocerebellar ataxia disease, Sandoff disease, GM2 gangliosidosis, Canavan disease, Cockayne syndrome, a pain disease or disorder, a neuropathy or nerve damage, or any combination thereof. Others are described elsewhere herein and/or will be appreciated by those of ordinary skill in the art in view of the description provided herein.

[0206] Other diseases can include, but are not limited to, any of the following: cancer (such as glioblastoma or other brain or CNS cancers), Acubetivacter infections, actinomycosis, African sleeping sickness, AIDS/HIV, ameobiasis, Anaplasmosis, Angiostrongyliasis, Anisakiasis, Anthrax, Acranobacterium haemolyticum infection, Argentine hemorrhagic fever, Ascariasis, Aspergillosis, Astrovirus infection, Babesiosis, Bacterial meningitis, Bacterial pneumonia, Bacterial vaginosis, Bacteroides infection, balantidiasis, Bartonellosis, Baylisascaris infection, BK virus infection, Black Piedra, Blastocytosis, Blastomycosis, Bolivian hemorrhagic fever, Botulism, Brazillian hemmorhagic fever, brucellosis, Bubonic plague, Burkholderia infection, buruli ulcer, calicivirus invention, campylobacteriosis, Candidasis, Capillariasis, Carrion's disease, Cat-scratch disease, cellulitis, Chagas Disease, Chancroid, Chickenpox, Chikungunya, Chlamydia, Chlamydia pneumoniae, Cholera, Chromoblastomycosis, Chytridiomycosis, Clonochiasis, Clostridium difficile colitis, Coccidioidomycosis, Colorado tick fever, rhinovirus/coronavirus invection (common cold), Cretzfeldt-Jakob disease, Crimean-congo hemorrhagic fever, Cryptococcosis, Cryptosporidosis, Cutaneous larva migrans (CLM), cyclosporiasis, cysticercosis, cytomegalovirus infection, Dengue fever, Desmodesmus infection, Dientamoebiasis, Diptheria, Diphylobothriasis, Dracunculiasis, Ebola, Echinococcosis, Ehrlichiosis, Enterobiasis, Enterococcus infection, Enterovirus infection, Epidemic typhus, Erthemia Infectisoum, Exanthem subitum, Fasciolasis, Fasciolopsiasis, fatal familial insomnia, filarisis, Clostridum perfingens infection, Fusobacterium infection, Gas gangrene (clostridial myonecrosis), Geotrichosis, Gerstmann-Straussler-Scheinker syndrome, Giardasis, Glanders, Gnathostomiasis, Gonorrhea, Granuloma inguinales, Group A streptococcal infection, Group B streptococcal infection, Haemophilus influenzae infection, Hand, foot, and mouth disease, hanta virus pulmonary syndrome, heartland virus disease, Helicobacter pylori infection, hemorrhagi fever with renal syndrome, Hendra virus infection, Hepatitis (all groups A, B, C, D, E), hepes simplex, histoplasmosis, hookworm infection, human bocavirus infection, human ewingii erlichosis, Human granulocytic anaplasmosis, human metapneymovirus infection, human monocytic ehrlichosis, human papaloma virus, Hymenolepiasis, Epstein-Barr infection, mononucleosis, influenza, isoporisis, Kawasaki disease, Kingell kingae infection, Kuru, Lasas fever, Leginollosis (Legionnaires's disease and Potomac Fever), Leishmaniasis, Leprosy, Leptospirosis, Listeriosis, Lyme disease, lymphatic filariasis, lymphocytic choriomeningitis, Malaria, Marburg hemorrhagic feaver, measals, Middle East respiratory syndrome, Meliodosis, menigitis, Menigococcal disease, Metagonimiasis, Microsporidosis, Molluscum contagiosum, Monkeypox, Mumps, Murine typhus, Mycoplasma pneumonia, Mycoplasma genitalium infection, Mycetoma, Myiasis, Conjunctivitis, Nipah virus infection, Norovirus, Variant Creutzfeldt-Jakob disease, Nocardosis, Onchocerciasis, Opisthorchiasis, Paracoccidioidomycosis, Paragonimiasis, Pasteurellosis, Pdiculosisi capitis, Pediculosis corpis, Pediculosis pubis, pelvic inflammatory disease, pertussis, plague, pneumococcal infection, pneumocystis pneumonia, pneumonia, poliomyelitis, prevotella infection, primary amoebic menigoencephalitis, progressive multifocal leukoencephalopathy, Psittacosis, Qfever, rabies, relapsing fever, respiratory syncytial virus infection, rhinovirus infection, rickettsial infection, Rickettsialpox, Rift Valley Fever, Rocky Mountain Spotted Fever, Rotavirus infection, Rubella, Salmonellosis, SARS, Scabies, Scarlet fever, Schistosomiais, Sepsis, Shigellosis, Shingles, Smallpox, Sporotrichosisi, Staphlococcol infection (including MRSA), strongyloidiasis, subacute sclerosing panecephalitis, Syphillis, Taeniasis, tetanus, Trichophyton species infection, Tocariasis, Toxoplasmosis, Trachoma, Trichinosis, Trichuriasis, Tuberculosis, Tularemia, Typhoid Fever, Typhus Fever, Ureaplasma urealyticum infection, Valley fever, Venezuelan equine encephalitis, Venezuelan hemorrhagic fever, Vibrio species infection, Viral pneumonia, West Nile Fever, White Piedra, Yersinia pseudotuberculosis, Yersiniosis, Yellow fever, Zeaspora, Zika fever, Zygomycosis and combinations thereof.

[0207] In example embodiments, a method is disclosed wherein the disease or disorder is a cancer, neurological disorder or infection.

[0208] In an embodiment, methods of treatment comprise administering a composition as detailed herein to a subject in need thereof. In an example embodiment, the cancer is a neuroepithelial cancer. In an embodiment, the cancer is a neuroepithelial tumor., for example, Astrocytic tumors, e.g., Diffuse Astrocytoma (fibrillary, protoplasmic, gemistocytic, mixed), Anaplastic (malignant) astrocytoma, Glioblastoma (giant cell, gliosarcoma variants), Pilocytic astrocytoma, Pleomorphic xanthoastrocytoma, or Subependymal giant cell astrocytoma; Oligodendroglial tumors, e.g., Oligodendroglioma, Anaplastic (malignant) Oligodendroglioma, Ependymal tumors, Ependymoma (cellular, papillary, clear cell, tanycytic), Anaplastic (malignant) ependymoma, ependymoma, Subependymoma; Mixed tumors, e.g., Oligoastrocytomaor Anaplastic (malignant) oligoastrocytoma; Choroid plexus tumors, e.g., Choroid Plexus papilloma or Choroid Plexus carcinoma; Neuronal and mixed neuronal-glial tumors, e.g., Gangliocytoma, Gangloglioma, Dysembryoplastic neuroepithelial tumor (DNET), Dysplastic gangliocytoma of the cerebellum (Lhermitte-Duclos), Desmoplastic infantile astrocytoma/ganglioglioma, Central neurocytoma, Anaplastic ganglioglioma, Cerebellar liponeurocytoma, Paraganglioma of the filum terminale; Pineal tumors, e.g., Pineocytoma, Pineoblastoma, Pineal parenchymal tumor of intermediate differentiation; Embryonal tumors, e.g., Medulloblastoma (desmoplastic, large cell, melanotic, medullomyoblastoma), Medulloepithelioma, Supratentorial primitive neuroectodermal tumors, PNETs such as Neuroblastoma, Ganglioneuroblastoma, Ependymoblastoma, or Atypical teratoid/rhabdoid tumor; Neuroblastic tumors, e.g., Olfactory (esthesioneuroblastoma), Olfactory neuroepithelioma, Neuroblastomas of the adrenal gland and sympathetic nervous system; Glial tumors of uncertain etiology, e.g., Astroblastoma, Gliomatosis cerebri, Chordoid glioma of the third ventricle.

[0209] In an embodiment, the cancer is a primary cancer metastasized to brain or other region of the central nervous system.

[0210] In an example embodiment, the neurological disorder is caused by a neurodegenerative or a neurodevelopmental disease. Example neurodegenerative diseases include, but are not limited to, Alzheimer's disease and other memory disorders, amyotrophic lateral sclerosis (ALS), ataxia, Huntington's disease, Parkinson's disease, motor neuron disease, multiple system atrophy, progressive supranuclear palsy. Examples of neurodevelopmental diseases include, but are not limited to, attention-deficit/hyperactivity disorder (ADHD), autism, learning disabilities, intellectual disability (also known as mental retardation), conduct disorders, cerebral palsy, speech and language disorders, Tourette syndrome, Schizophrenia, Fragile X syndrome, and impairments in vision and hearing.

Exemplary CNS, Brain, and/or Neuronal Disease-Associated Genes

[0211] Examples of CNS, brain, and/or neuronal disease-associated genes and polynucleotides that can be modified using the engineered delivery AAV delivery system molecules, vectors, capsids, engineered cells, and/or engineered delivery particles described herein are described below.

[0212] In some embodiments, a therapeutic or preventive, such as the engineered AAV capsids and systems thereof as described elsewhere herein, can be delivered to a subject in need thereof or a cell thereof to treat a brain, neuron, neurological, and/or central nervous system disease or disorder (CNS). In some embodiments the brain, neuron, neurological, and/or CNS disease or disorder can be caused, directly or indirectly, by one or mutations in one or more of the following genes as compared to normal or non-pathological variant of the same: in the case of Amyotrophic lateral sclerosis (ALS): SOD1, ALS2, STEX, FUS, TARDBP, VEGF (VEGF-a, VEGF-b, VEGF-c); in the case of Alzheimer's disease: E1, CHIP, UCH, UBB, Tau, LRP, PICALM, Clusterin, PS1, SORLI, CR1, Vldlr, Ubal, Uba3, CHIP28, Aqp1, Uchl1, Uch13, APP, AAA, CVAP, ADI, APOE, AD2, PSEN2, AD4, STM2, APBB2, FE65L1, NOS3, PLAU, URK, ACE, DCP1, ACEI, MPO, PACIPI, PAXIPIL, PTIP, A2M, BLMH, BMH, PSEN1, AD3); in the case of Autism: Mecp2, BZRAPI, MDGA2, Sema5A, Neurexin 1, GLO1, MECP2, RTT, PPMX, MRX16, MRX79, NLGN3, NLGN4, KIAA1260, AUTSX2; in the case of Fragile X Syndrome: FMR2, FXR1, FXR2, mGLUR5; in the case of Huntington's disease and disease like disorders: HD, IT15, PRNP, PRIP, JPH3, JP3, HDL2, TBP, SCA17); in the case of Parkinson's disease: NR4A2, NURRI, NOT, TINUR, SNCAIP, TBP, SCA17, SNCA, NACP, PARKI, PARK4, DJI, PARK7, LRRK2, PARK8, PINK1, PARK6, UCHLI, PARK5, SNCA, NACP, PARKI, PARK4, PRKN, PARK2, PDJ, DBH, NDUFV2, PINK 1, x-synuclein); in the case of Rett syndrome: MECP2, RTT, PPMX, MRX16, MRX79, CDKL5, STK9, MECP2, RTT, PPMX, MRX16, MRX79, x-Synuclein, DJ-1; in the case of Schizophrenia: Neuregulin1 (Nrg1), Erb4 (receptor for Neuregulin), Complexin1 (Cplx1), Tphl Tryptophan hydroxylase, Tph2, Tryptophan hydroxylase 2, Neurexin 1, GSK3, GSK3a, GSK3b, 5-HTT (Slc6a4), COMT, DRD (Drdla), SLC6A3, DAOA, DTNBPI, Dao (Daol)); in the case of Secretase Related Disorders (APH-1 (alpha and beta), Presenilin (Psen1), nicastrin, (Ncstn), PEN-2, Nos1, Parp1, Nat1, Nat2); in the case of Trinucleotide Repeat Disorders (HTT (Huntington's Dx), SBMA/SMAX1/AR (Kennedy's Dx), FXN/X25 (Friedrich's Ataxia), ATX3 (Machado-Joseph's Dx), ATXNI and ATXN2 (spinocerebellar ataxias), DMPK (myotonic dystrophy), Atrophin-1 and Atnl (DRPLA Dx), CBP (Creb-BP—global instability), VLDLR (Alzheimer's), Atxn7, Atxn10); in the case of diseases or disorders associated with or involving aberrant or abnormal axonal guidance signaling in the brain, neurons, and/or CNS: PRKCE; ITGAM; ROCK1; ITGA5; CXCR4; ADAM12; IGF1; RAC1; RAP1A; EIF4E; PRKCZ; NRP1; NTRK2; ARHGEF7; SMO; ROCK2; MAPK1; PGF; RAC2; PTPN11; GNAS; AKT2; PIK3CA; ERBB2; PRKCI; PTK2; CFL1; GNAQ; PIK3CB; CXCL12; PIK3C3; WNT11; PRKD1; GNB2L1; ABL1; MAPK3; ITGA1; KRAS; RHOA; PRKCD; PIK3C2A; ITGB7; GLI2; PXN; VASP; RAF1; FYN; ITGB1; MAP2K2; PAK4; ADAM17; AKT1; PIK3R1; GLII; WNT5A; ADAM10; MAP2K1; PAK3; ITGB3; CDC42; VEGFA; ITGA2; EPHA8; CRKL; RND1; GSK3B; AKT3; PRKCA; in the case of diseases or disorders associated with or involving aberrant or abnormal actin cytoskeleton signaling in the brain, neurons, and/or CNS: ACTN4; PRKCE; ITGAM; ROCK1; ITGA5; IRAKI; PRKAA2; EIF2AK2; RAC1; INS; ARHGEF7; GRK6; ROCK2; MAPK1; RAC2; PLK1; AKT2; PIK3CA; CDK8; PTK2; CFL1; PIK3CB; MYH9; DIAPH1; PIK3C3; MAPK8; F2R; MAPK3; SLC9A1; ITGAI; KRAS; RHOA; PRKCD; PRKAA1; MAPK9; CDK2; PIM1; PIK3C2A; ITGB7; PPPICC; PXN; VIL2; RAF1; GSN; DYRKIA; ITGB1; MAP2K2; PAK4; PIP5KIA; PIK3R1; MAP2K1; PAK3; ITGB3; CDC42; APC; ITGA2; TTK; CSNKIA1; CRKL; BRAF; VAV3; SGK; in the case of diseases or disorders associated with or involving Huntington's Disease signaling: PRKCE; IGF1; EP300; RCOR1; PRKCZ; HDAC4; TGM2; MAPK1; CAPNS1; AKT2; EGFR; NCOR2; SP1; CAPN2; PIK3CA; HDAC5; CREB1; PRKCI; HSPA5; REST; GNAQ; PIK3CB; PIK3C3; MAPK8; IGF1R; PRKD1; GNB2L1; BCL2L1; CAPN1; MAPK3; CASP8; HDAC2; HDAC7A; PRKCD; HDAC11; MAPK9; HDAC9; PIK3C2A; HDAC3; TP53; CASP9; CREBBP; AKT1; PIK3R1; PDPKI; CASP1; APAF1; FRAP1; CASP2; JUN; BAX; ATF4; AKT3; PRKCA; CLTC; SGK; HDAC6; CASP3; in the case of diseases or disorders associated with or involving aberrant, pathologic, and/or abnormal apoptosis regulation and/or signaling in the brain, neurons, and/or CNS and/or diseases or disorders thereof: PRKCE; ROCK1; BID; IRAK1; PRKAA2; EIF2AK2; BAK1; BIRC4; GRK6; MAPK1; CAPNS1; PLK1; AKT2; IKBKB; CAPN2; CDK8; FAS; NFKB2; BCL2; MAP3K14; MAPK8; BCL2L1; CAPN1; MAPK3; CASP8; KRAS; RELA; PRKCD; PRKAA1; MAPK9; CDK2; PIM1; TP53; TNF; RAF1; IKBKG; RELB; CASP9; DYRKIA; MAP2K2; CHUK; APAF1; MAP2K1; NFKB1; PAK3; LMNA; CASP2; BIRC2; TTK; CSNKIA1; BRAF; BAX; PRKCA; SGK; CASP3; BIRC3; PARP1; in the case of diseases or disorders associated with or involving aberrant, pathologic, and/or abnormal leukocyte extravasation signaling in the brain, neurons, and/or CNS and/or diseases or disorders thereof: ACTN4; CD44; PRKCE; ITGAM; ROCK1; CXCR4; CYBA; RAC1; RAP1A; PRKCZ; ROCK2; RAC2; PTPN11; MMP14; PIK3CA; PRKCI; PTK2; PIK3CB; CXCL12; PIK3C3; MAPK8; PRKD1; ABL1; MAPK10; CYBB; MAPK13; RHOA; PRKCD; MAPK9; SRC; PIK3C2A; BTK; MAPK14; NOX1; PXN; VIL2; VASP; ITGB1; MAP2K2; CTNND1; PIK3R1; CTNNB1; CLDNI; CDC42; F11R; ITK; CRKL; VAV3; CTTN; PRKCA; MMP1; MMP9; in the case of diseases or disorders associated with or involving aberrant, pathologic, and/or abnormal integrin signaling in the brain, neurons, and/or CNS and/or diseases or disorders thereof: ACTN4; ITGAM; ROCK1; ITGA5; RAC1; PTEN; RAP1A; TLN1; ARHGEF7; MAPK1; RAC2; CAPNS1; AKT2; CAPN2; PIK3CA; PTK2; PIK3CB; PIK3C3; MAPK8; CAV1; CAPN1; ABL1; MAPK3; ITGA1; KRAS; RHOA; SRC; PIK3C2A; ITGB7; PPPICC; ILK; PXN; VASP; RAF1; FYN; ITGB1; MAP2K2; PAK4; AKT1; PIK3R1; TNK2; MAP2K1; PAK3; ITGB3; CDC42; RND3; ITGA2; CRKL; BRAF; GSK3B; AKT3; in the case of diseases or disorders associated with or involving aberrant, pathologic, and/or abnormal acute phase response signaling in the brain, neurons, and/or CNS and/or diseases or disorders thereof: IRAK1; SOD2; MYD88; TRAF6; ELK1; MAPK1; PTPN11; AKT2; IKBKB; PIK3CA; FOS; NFKB2; MAP3K14; PIK3CB; MAPK8; RIPK1; MAPK3; IL6ST; KRAS; MAPK13; IL6R; RELA; SOCS1; MAPK9; FTL; NR3C1; TRAF2; SERPINE1; MAPK14; TNF; RAF1; PDK1; IKBKG; RELB; MAP3K7; MAP2K2; AKT1; JAK2; PIK3R1; CHUK; STAT3; MAP2K1; NFKB1; FRAP1; CEBPB; JUN; AKT3; ILIR1; IL6; in the case of diseases or disorders associated with or involving aberrant, pathologic, and/or abnormal PTEN signaling in the brain, neurons, and/or CNS and/or diseases or disorders thereof: ITGAM; ITGA5; RAC1; PTEN; PRKCZ; BCL2L11; MAPK1; RAC2; AKT2; EGFR; IKBKB; CBL; PIK3CA; CDKN1B; PTK2; NFKB2; BCL2; PIK3CB; BCL2L1; MAPK3; ITGA1; KRAS; ITGB7; ILK; PDGFRB; INSR; RAF1; IKBKG; CASP9; CDKN1A; ITGB1; MAP2K2; AKT1; PIK3R1; CHUK; PDGFRA; PDPK1; MAP2K1; NFKB1; ITGB3; CDC42; CCND1; GSK3A; ITGA2; GSK3B; AKT3; FOXO1; CASP3; RPS6KB1; in the case of diseases or disorders associated with or involving aberrant, pathologic, and/or abnormal p53 signaling in the brain, neurons, and/or CNS and/or diseases or disorders thereof: PTEN; EP300; BBC3; PCAF; FASN; BRCA1; GADD45A; BIRC5; AKT2; PIK3CA; CHEK1; TP53INP1; BCL2; PIK3CB; PIK3C3; MAPK8; THBS1; ATR; BCL2L1; E2F1; PMAIP1; CHEK2; TNFRSF10B; TP73; RB1; HDAC9; CDK2; PIK3C2A; MAPK14; TP53; LRDD; CDKN1A; HIPK2; AKT1; PIK3R1; RRM2B; APAF1; CTNNB1; SIRT1; CCND1; PRKDC; ATM; SFN; CDKN2A; JUN; SNAI2; GSK3B; BAX; AKT3; in the case of diseases or disorders associated with or involving aberrant, pathologic, and/or abnormal aryl hydrocarbon receptor signaling in the brain, neurons, and/or CNS and/or diseases or disorders thereof: HSPB1; EP300; FASN; TGM2; RXRA; MAPK1; NQO1; NCOR2; SP1; ARNT; CDKN1B; FOS; CHEK1; SMARCA4; NFKB2; MAPK8; ALDH1A1; ATR; E2F1; MAPK3; NRIP1; CHEK2; RELA; TP73; GSTP1; RB1; SRC; CDK2; AHR; NFE2L2; NCOA3; TP53; TNF; CDKN1A; NCOA2; APAF1; NFKB1; CCND1; ATM; ESRI; CDKN2A; MYC; JUN; ESR2; BAX; IL6; CYPIB1; HSP90AA1; in the case of diseases or disorders associated with or involving aberrant, pathologic, and/or abnormal xenobiotic metabolism signaling in the brain, neurons, and/or CNS and/or diseases or disorders thereof: PRKCE; EP300; PRKCZ; RXRA; MAPK1; NQO1; NCOR2; PIK3CA; ARNT; PRKCI; NFKB2; CAMK2A; PIK3CB; PPP2R1A; PIK3C3; MAPK8; PRKD1; ALDH1A1; MAPK3; NRIP1; KRAS; MAPK13; PRKCD; GSTP1; MAPK9; NOS2A; ABCB1; AHR; PPP2CA; FTL; NFE2L2; PIK3C2A; PPARGCIA; MAPK14; TNF; RAF1; CREBBP; MAP2K2; PIK3R1; PPP2R5C; MAP2K1; NFKB1; KEAP1; PRKCA; EIF2AK3; IL6; CYPIB1; HSP90AA1; in the case of diseases or disorders associated with or involving aberrant, pathologic, and/or abnormal SAPK/JNK signaling in the brain, neurons, and/or CNS and/or diseases or disorders thereof: PRKCE; IRAK1; PRKAA2; EIF2AK2; RAC1; ELK1; GRK6; MAPK1; GADD45A; RAC2; PLK1; AKT2; PIK3CA; FADD; CDK8; PIK3CB; PIK3C3; MAPK8; RIPK1; GNB2L1; IRS1; MAPK3; MAPK10; DAXX; KRAS; PRKCD; PRKAA1; MAPK9; CDK2; PIM1; PIK3C2A; TRAF2; TP53; LCK; MAP3K7; DYRKIA; MAP2K2; PIK3R1; MAP2K1; PAK3; CDC42; JUN; TTK; CSNKIA1; CRKL; BRAF; SGK; in the case of diseases or disorders associated with or involving aberrant, pathologic, and/or abnormal PPAr/RXR signaling in the brain, neurons, and/or CNS and/or diseases or disorders thereof: PRKAA2; EP300; INS; SMAD2; TRAF6; PPARA; FASN; RXRA; MAPK1; SMAD3; GNAS; IKBKB; NCOR2; ABCA1; GNAQ; NFKB2; MAP3K14; STAT5B; MAPK8; IRS1; MAPK3; KRAS; RELA; PRKAA1; PPARGCIA; NCOA3; MAPK14; INSR; RAF1; IKBKG; RELB; MAP3K7; CREBBP; MAP2K2; JAK2; CHUK; MAP2K1; NFKB1; TGFBR1; SMAD4; JUN; ILIR1; PRKCA; IL6; HSP90AA1; ADIPOQ; in the case of diseases or disorders associated with or involving aberrant, pathologic, and/or abnormal NF-kappaB signaling in the brain, neurons, and/or CNS and/or diseases or disorders thereof: IRAK1; EIF2AK2; EP300; INS; MYD88; PRKCZ; TRAF6; TBK1; AKT2; EGFR; IKBKB; PIK3CA; BTRC; NFKB2; MAP3K14; PIK3CB; PIK3C3; MAPK8; RIPK1; HDAC2; KRAS; RELA; PIK3C2A; TRAF2; TLR4; PDGFRB; TNF; INSR; LCK; IKBKG; RELB; MAP3K7; CREBBP; AKT1; PIK3R1; CHUK; PDGFRA; NFKB1; TLR2; BCL10; GSK3B; AKT3; TNFAIP3; ILIR1; in the case of diseases or disorders associated with or involving aberrant, pathologic, and/or abnormal neuregulin signaling in the brain, neurons, and/or CNS and/or diseases or disorders thereof: ERBB4; PRKCE; ITGAM; ITGA5; PTEN; PRKCZ; ELK1; MAPK1; PTPN11; AKT2; EGFR; ERBB2; PRKCI; CDKN1B; STAT5B; PRKD1; MAPK3; ITGAI; KRAS; PRKCD; STAT5A; SRC; ITGB7; RAF1; ITGB1; MAP2K2; ADAM17; AKT1; PIK3R1; PDPK1; MAP2K1; ITGB3; EREG; FRAP1; PSEN1; ITGA2; MYC; NRG1; CRKL; AKT3; PRKCA; HSP90AA1; RPS6KB1; in the case of diseases or disorders associated with or involving aberrant, pathologic, and/or abnormal wnt and beta catenin signaling in the brain, neurons, and/or CNS and/or diseases or disorders thereof: CD44; EP300; LRP6; DVL3; CSNK1E; GJA1; SMO; AKT2; PIN1; CDH1; BTRC; GNAQ; MARK2; PPP2R1A; WNT11; SRC; DKK1; PPP2CA; SOX6; SFRP2; ILK; LEF1; SOX9; TP53; MAP3K7; CREBBP; TCF7L2; AKT1; PPP2R5C; WNT5A; LRP5; CTNNB1; TGFBR1; CCND1; GSK3A; DVL1; APC; CDKN2A; MYC; CSNKIA1; GSK3B; AKT3; SOX2; in the case of diseases or disorders associated with or involving aberrant, pathologic, and/or abnormal insulin receptor signaling in the brain, neurons, and/or CNS and/or diseases or disorders thereof: PTEN; INS; EIF4E; PTPN1; PRKCZ; MAPK1; TSC1; PTPN11; AKT2; CBL; PIK3CA; PRKCI; PIK3CB; PIK3C3; MAPK8; IRS1; MAPK3; TSC2; KRAS; EIF4EBP1; SLC2A4; PIK3C2A; PPPICC; INSR; RAFI; FYN; MAP2K2; JAK1; AKT1; JAK2; PIK3R1; PDPK1; MAP2K1; GSK3A; FRAP1; CRKL; GSK3B; AKT3; FOXO1; SGK; RPS6KB1; in the case of diseases or disorders associated with or involving aberrant, pathologic, and/or abnormal IL-6 signaling in the brain, neurons, and/or CNS and/or diseases or disorders thereof: HSPB1; TRAF6; MAPKAPK2; ELK1; MAPK1; PTPN11; IKBKB; FOS; NFKB2; MAP3K14; MAPK8; MAPK3; MAPK10; IL6ST; KRAS; MAPK13; IL6R; RELA; SOCS1; MAPK9; ABCB1; TRAF2; MAPK14; TNF; RAF1; IKBKG; RELB; MAP3K7; MAP2K2; IL8; JAK2; CHUK; STAT3; MAP2K1; NFKB1; CEBPB; JUN; ILIR1; SRF; IL6; in the case of diseases or disorders associated with or involving aberrant, pathologic, and/or abnormal IGF-1 signaling in the brain, neurons, and/or CNS and/or diseases or disorders thereof: IGF1; PRKCZ; ELK1; MAPK1; PTPN11; NEDD4; AKT2; PIK3CA; PRKCI; PTK2; FOS; PIK3CB; PIK3C3; MAPK8; IGF1R; IRS1; MAPK3; IGFBP7; KRAS; PIK3C2A; YWHAZ; PXN; RAF1; CASP9; MAP2K2; AKT1; PIK3R1; PDPK1; MAP2K1; IGFBP2; SFN; JUN; CYR61; AKT3; FOXO1; SRF; CTGF; RPS6KB1; in the case of diseases or disorders associated with or involving aberrant, pathologic, and/or abnormal NRF2-mediated oxidative stress response pathway regulation or signaling in the brain, neurons, and/or CNS and/or diseases or disorders thereof: PRKCE; EP300; SOD2; PRKCZ; MAPK1; SQSTM1; NQO1; PIK3CA; PRKCI; FOS; PIK3CB; PIK3C3; MAPK8; PRKD1; MAPK3; KRAS; PRKCD; GSTP1; MAPK9; FTL; NFE2L2; PIK3C2A; MAPK14; RAF1; MAP3K7; CREBBP; MAP2K2; AKT1; PIK3R1; MAP2K1; PPIB; JUN; KEAP1; GSK3B; ATF4; PRKCA; EIF2AK3; HSP90AA1; PRDX1; in the case of diseases or disorders associated with or involving aberrant, pathologic, and/or abnormal PPAR (e.g. PPAR alpha, PPAR beta, PPAR delta, and/or PPAR gamma) regulation or signaling in the brain, neurons, and/or CNS and/or diseases or disorders thereof: EP300; INS; TRAF6; PPARA; RXRA; MAPK1; IKBKB; NCOR2; FOS; NFKB2; MAP3K14; STAT5B; MAPK3; NRIP1; KRAS; PPARG; RELA; STAT5A; TRAF2; PPARGCIA; PDGFRB; TNF; INSR; RAF1; IKBKG; RELB; MAP3K7; CREBBP; MAP2K2; CHUK; PDGFRA; MAP2K1; NFKB1; JUN; ILIR1; HSP90AA1; in the case of diseases or disorders associated with or involving aberrant, pathologic, and/or abnormal Fc Epsilon RI regulation or signaling in the brain, neurons, and/or CNS and/or diseases or disorders thereof: PRKCE; RAC1; PRKCZ; LYN; MAPK1; RAC2; PTPN11; AKT2; PIK3CA; SYK; PRKCI; PIK3CB; PIK3C3; MAPK8; PRKD1; MAPK3; MAPK10; KRAS; MAPK13; PRKCD; MAPK9; PIK3C2A; BTK; MAPK14; TNF; RAF1; FYN; MAP2K2; AKT1; PIK3R1; PDPK1; MAP2K1; AKT3; VAV3; PRKCA; in the case of diseases or disorders associated with or involving aberrant, pathologic, and/or abnormal G-protein coupled receptor regulation or signaling in the brain, neurons, and/or CNS and/or diseases or disorders thereof: PRKCE; RAP1A; RGS16; MAPK1; GNAS; AKT2; IKBKB; PIK3CA; CREB1; GNAQ; NFKB2; CAMK2A; PIK3CB; PIK3C3; MAPK3; KRAS; RELA; SRC; PIK3C2A; RAF1; IKBKG; RELB; FYN; MAP2K2; AKT1; PIK3R1; CHUK; PDPK1; STAT3; MAP2K1; NFKB1; BRAF; ATF4; AKT3; PRKCA; in the case of diseases or disorders associated with or involving aberrant, pathologic, and/or abnormal inositol phosphate metabolism regulation or signaling in the brain, neurons, and/or CNS and/or diseases or disorders thereof: PRKCE; IRAK1; PRKAA2; EIF2AK2; PTEN; GRK6; MAPK1; PLK1; AKT2; PIK3CA; CDK8; PIK3CB; PIK3C3; MAPK8; MAPK3; PRKCD; PRKAA1; MAPK9; CDK2; PIM1; PIK3C2A; DYRKIA; MAP2K2; PIP5K1A; PIK3R1; MAP2K1; PAK3; ATM; TTK; CSNKIA1; BRAF; SGK; in the case of diseases or disorders associated with or involving aberrant, pathologic, and/or abnormal PDGF regulation or signaling in the brain, neurons, and/or CNS and/or diseases or disorders thereof: EIF2AK2; ELK1; ABL2; MAPK1; PIK3CA; FOS; PIK3CB; PIK3C3; MAPK8; CAV1; ABL1; MAPK3; KRAS; SRC; PIK3C2A; PDGFRB; RAF1; MAP2K2; JAK1; JAK2; PIK3R1; PDGFRA; STAT3; SPHK1; MAP2K1; MYC; JUN; CRKL; PRKCA; SRF; STAT1; SPHK2; in the case of diseases or disorders associated with involving aberrant, pathologic, and/or abnormal VEGF regulation or signaling in the brain, neurons, and/or CNS and/or diseases or disorders thereof: ACTN4; ROCK1; KDR; FLT1; ROCK2; MAPK1; PGF; AKT2; PIK3CA; ARNT; PTK2; BCL2; PIK3CB; PIK3C3; BCL2L1; MAPK3; KRAS; HIF1A; NOS3; PIK3C2A; PXN; RAF1; MAP2K2; ELAVL1; AKT1; PIK3R1; MAP2K1; SFN; VEGFA; AKT3; FOXO1; PRKCA; in the case of diseases or disorders associated with or involving aberrant, pathologic, and/or abnormal natural killer cell regulation or signaling in the brain, neurons, and/or CNS and/or diseases or disorders thereof: PRKCE; RAC1; PRKCZ; MAPK1; RAC2; PTPN11; KIR2DL3; AKT2; PIK3CA; SYK; PRKCI; PIK3CB; PIK3C3; PRKD1; MAPK3; KRAS; PRKCD; PTPN6; PIK3C2A; LCK; RAFI; FYN; MAP2K2; PAK4; AKT1; PIK3R1; MAP2K1; PAK3; AKT3; VAV3; PRKCA; in the case of diseases or disorders associated with or involving aberrant, pathologic, and/or abnormal cell cycle G1/S checkpoint regulation or signaling in the brain, neurons, and/or CNS and/or diseases or disorders thereof: HDAC4; SMAD3; SUV39H1; HDAC5; CDKN1B; BTRC; ATR; ABL1; E2F1; HDAC2; HDAC7A; RB1; HDAC11; HDAC9; CDK2; E2F2; HDAC3; TP53; CDKN1A; CCND1; E2F4; ATM; RBL2; SMAD4; CDKN2A; MYC; NRG1; GSK3B; RBL1; HDAC6; in the case of diseases or disorders associated with or involving aberrant, pathologic, and/or abnormal T-cell receptor regulation or signaling in the brain, neurons, and/or CNS and/or diseases or disorders thereof: RAC1; ELK1; MAPK1; IKBKB; CBL; PIK3CA; FOS; NFKB2; PIK3CB; PIK3C3; MAPK8; MAPK3; KRAS; RELA; PIK3C2A; BTK; LCK; RAFI; IKBKG; RELB; FYN; MAP2K2; PIK3R1; CHUK; MAP2K1; NFKB1; ITK; BCL10; JUN; VAV3; in the case of diseases or disorders associated with or involving aberrant, pathologic, and/or abnormal death receptor regulation or signaling in the brain, neurons, and/or CNS and/or diseases or disorders thereof: CRADD; HSPB1; BID; BIRC4; TBK1; IKBKB; FADD; FAS; NFKB2; BCL2; MAP3K14; MAPK8; RIPK1; CASP8; DAXX; TNFRSF10B; RELA; TRAF2; TNF; IKBKG; RELB; CASP9; CHUK; APAF1; NFKB1; CASP2; BIRC2; CASP3; BIRC3; in the case of diseases or disorders associated with or involving aberrant, pathologic, and/or FGF regulation or signaling in the brain, neurons, and/or CNS and/or diseases or disorders thereof: RAC1; FGFR1; MET; MAPKAPK2; MAPK1; PTPN11; AKT2; PIK3CA; CREB1; PIK3CB; PIK3C3; MAPK8; MAPK3; MAPK13; PTPN6; PIK3C2A; MAPK14; RAF1; AKT1; PIK3R1; STAT3; MAP2K1; FGFR4; CRKL; ATF4; AKT3; PRKCA; HGF; in the case of diseases or disorders associated with or involving aberrant, pathologic, and/or GM-CSF regulation or signaling in the brain, neurons, and/or CNS and/or diseases or disorders thereof: LYN; ELK1; MAPK1; PTPN11; AKT2; PIK3CA; CAMK2A; STAT5B; PIK3CB; PIK3C3; GNB2L1; BCL2L1; MAPK3; ETS1; KRAS; RUNX1; PIM1; PIK3C2A; RAF1; MAP2K2; AKT1; JAK2; PIK3R1; STAT3; MAP2K1; CCND1; AKT3; STAT1; in the case of diseases or disorders associated with or involving aberrant, pathologic, and/or amyotrophic lateral sclerosis regulation or signaling in the brain, neurons, and/or CNS and/or diseases or disorders thereof: BID; IGF1; RAC1; BIRC4; PGF; CAPNS1; CAPN2; PIK3CA; BCL2; PIK3CB; PIK3C3; BCL2L1; CAPN1; PIK3C2A; TP53; CASP9; PIK3R1; RAB5A; CASP1; APAF1; VEGFA; BIRC2; BAX; AKT3; CASP3; BIRC3; in the case of diseases or disorders associated with or involving aberrant, pathologic, and/or JAK/Stat regulation or signaling in the brain, neurons, and/or CNS and/or diseases or disorders thereof: PTPN1; MAPK1; PTPN11; AKT2; PIK3CA; STAT5B; PIK3CB; PIK3C3; MAPK3; KRAS; SOCS1; STAT5A; PTPN6; PIK3C2A; RAFI; CDKN1A; MAP2K2; JAK1; AKT1; JAK2; PIK3R1; STAT3; MAP2K1; FRAP1; AKT3; STAT1; in the case of diseases or disorders associated with or involving aberrant, pathologic, and/or nicotinate and nicotinamide metabolism regulation or signaling in the brain, neurons, and/or CNS and/or diseases or disorders thereof: PRKCE; IRAK1; PRKAA2; EIF2AK2; GRK6; MAPK1; PLK1; AKT2; CDK8; MAPK8; MAPK3; PRKCD; PRKAA1; PBEF1; MAPK9; CDK2; PIM1; DYRKIA; MAP2K2; MAP2K1; PAK3; NT5E; TTK; CSNKIA1; BRAF; SGK; in the case of diseases or disorders associated with or involving aberrant, pathologic, and/or chemokine signaling regulation or signaling in the brain, neurons, and/or CNS and/or diseases or disorders thereof: CXCR4; ROCK2; MAPK1; PTK2; FOS; CFL1; GNAQ; CAMK2A; CXCL12; MAPK8; MAPK3; KRAS; MAPK13; RHOA; CCR3; SRC; PPPICC; MAPK14; NOX1; RAF1; MAP2K2; MAP2K1; JUN; CCL2; PRKCA; in the case of diseases or disorders associated with or involving aberrant, pathologic, and/or IL-2 signaling regulation or signaling in the brain, neurons, and/or CNS and/or diseases or disorders thereof: ELK1; MAPK1; PTPN11; AKT2; PIK3CA; SYK; FOS; STAT5B; PIK3CB; PIK3C3; MAPK8; MAPK3; KRAS; SOCS1; STAT5A; PIK3C2A; LCK; RAF1; MAP2K2; JAK1; AKT1; PIK3R1; MAP2K1; JUN; AKT3; in the case of diseases or disorders associated with or involving synaptic long term depression in the brain, neurons, and/or CNS and/or diseases or disorders thereof: PRKCE; IGF1; PRKCZ; PRDX6; LYN; MAPK1; GNAS; PRKCI; GNAQ; PPP2R1A; IGF1R; PRKD1; MAPK3; KRAS; GRN; PRKCD; NOS3; NOS2A; PPP2CA; YWHAZ; RAF1; MAP2K2; PPP2R5C; MAP2K1; PRKCA; in the case of diseases or disorders associated with or involving aberrant, pathologic, and/or estrogen receptor regulation or signaling in the brain, neurons, and/or CNS and/or diseases or disorders thereof: TAF4B; EP300; CARMI; PCAF; MAPK1; NCOR2; SMARCA4; MAPK3; NRIP1; KRAS; SRC; NR3C1; HDAC3; PPARGCIA; RBM9; NCOA3; RAF1; CREBBP; MAP2K2; NCOA2; MAP2K1; PRKDC; ESRI; ESR2; in the case of diseases or disorders associated with or involving aberrant, pathologic, and/or protein ubiquitination pathway activity, regulation, and/or signaling in the brain, neurons, and/or CNS and/or diseases or disorders thereof: TRAF6; SMURF1; BIRC4; BRCA1; UCHLI; NEDD4; CBL; UBE2I; BTRC; HSPA5; USP7; USP10; FBXW7; USP9X; STUB1; USP22; B2M; BIRC2; PARK2; USP8; USP1; VHL; HSP90AA1; BIRC3; in the case of diseases or disorders associated with or involving aberrant, pathologic, and/or IL-10 regulation or signaling in the brain, neurons, and/or CNS and/or diseases or disorders thereof: TRAF6; CCR1; ELK1; IKBKB; SP1; FOS; NFKB2; MAP3K14; MAPK8; MAPK13; RELA; MAPK14; TNF; IKBKG; RELB; MAP3K7; JAK1; CHUK; STAT3; NFKB1; JUN; ILIR1; IL6; in the case of diseases or disorders associated with or involving aberrant, pathologic, and/or Vitamin D receptor (VDR) and/or RXR regulation or signaling in the brain, neurons, and/or CNS and/or diseases or disorders thereof: PRKCE; EP300; PRKCZ; RXRA; GADD45A; HES1; NCOR2; SP1; PRKCI; CDKN1B; PRKD1; PRKCD; RUNX2; KLF4; YY1; NCOA3; CDKN1A; NCOA2; SPP1; LRP5; CEBPB; FOXO1; PRKCA; in the case of diseases or disorders associated with or involving aberrant, pathologic, and/or TGF-beta regulation or signaling in the brain, neurons, and/or CNS and/or diseases or disorders thereof: EP300; SMAD2; SMURF1; MAPK1; SMAD3; SMAD1; FOS; MAPK8; MAPK3; KRAS; MAPK9; RUNX2; SERPINE1; RAF1; MAP3K7; CREBBP; MAP2K2; MAP2K1; TGFBR1; SMAD4; JUN; SMAD5; in the case of diseases or disorders associated with or involving aberrant, pathologic, and/or Toll-like Receptor activity, regulation, and/or signaling in the brain, neurons, and/or CNS and/or diseases or disorders thereof: IRAK1; EIF2AK2; MYD88; TRAF6; PPARA; ELK1; IKBKB; FOS; NFKB2; MAP3K14; MAPK8; MAPK13; RELA; TLR4; MAPK14; IKBKG; RELB; MAP3K7; CHUK; NFKB1; TLR2; JUN; in the case of diseases or disorders associated with or involving aberrant, pathologic, and/or p38 MAPK activity, regulation, and/or signaling in the brain, neurons, and/or CNS and/or diseases or disorders thereof: HSPB1; IRAK1; TRAF6; MAPKAPK2; ELK1; FADD; FAS; CREB1; DDIT3; RPS6KA4; DAXX; MAPK13; TRAF2; MAPK14; TNF; MAP3K7; TGFBR1; MYC; ATF4; ILIR1; SRF; STAT1; in the case of diseases or disorders associated with or involving aberrant, pathologic, and/or neurotrophin/TRK activity, regulation, and/or signaling in the brain, neurons, and/or CNS and/or diseases or disorders thereof: NTRK2; MAPK1; PTPN11; PIK3CA; CREB1; FOS; PIK3CB; PIK3C3; MAPK8; MAPK3; KRAS; PIK3C2A; RAF1; MAP2K2; AKT1; PIK3R1; PDPK1; MAP2K1; CDC42; JUN; ATF4; in the case of diseases or disorders associated with or involving aberrant, pathologic, and/or FXR and/or RXR activity, regulation, and/or signaling in the brain, neurons, and/or CNS and/or diseases or disorders thereof: INS; PPARA; FASN; RXRA; AKT2; SDC1; MAPK8; APOB; MAPK10; PPARG; MTTP; MAPK9; PPARGCIA; TNF; CREBBP; AKT1; SREBF1; FGFR4; AKT3; FOXO1; in the case of diseases or disorders associated with or involving aberrant, pathologic, and/or synaptic long term potentiation in the brain, neurons, and/or CNS and/or diseases or disorders thereof: PRKCE; RAP1A; EP300; PRKCZ; MAPK1; CREB1; PRKCI; GNAQ; CAMK2A; PRKD1; MAPK3; KRAS; PRKCD; PPPICC; RAFI; CREBBP; MAP2K2; MAP2K1; ATF4; PRKCA; in the case of diseases or disorders associated with or involving aberrant, pathologic, and/or calcium regulation and/or signaling in the brain, neurons, and/or CNS and/or diseases or disorders thereof: RAP1A; EP300; HDAC4; MAPK1; HDAC5; CREB1; CAMK2A; MYH9; MAPK3; HDAC2; HDAC7A; HDAC11; HDAC9; HDAC3; CREBBP; CALR; CAMKK2; ATF4; HDAC6; in the case of diseases or disorders associated with or involving aberrant, pathologic, and/or EGF or EGFR regulation and/or signaling in the brain, neurons, and/or CNS and/or diseases or disorders thereof: ELK1; MAPK1; EGFR; PIK3CA; FOS; PIK3CB; PIK3C3; MAPK8; MAPK3; PIK3C2A; RAF1; JAK1; PIK3R1; STAT3; MAP2K1; JUN; PRKCA; SRF; STAT1; in the case of diseases or disorders associated with or involving aberrant, pathologic, and/or LPS/IL-1 mediated inhibition of RXR function, regulation and/or signaling in the brain, neurons, and/or CNS and/or diseases or disorders thereof: IRAK1; MYD88; TRAF6; PPARA; RXRA; ABCA1; MAPK8; ALDH1A1; GSTP1; MAPK9; ABCB1; TRAF2; TLR4; TNF; MAP3K7; NR1H2; SREBF1; JUN; ILIR1; in the case of diseases or disorders associated with or involving aberrant, pathologic, and/or LXR/RXR function, regulation and/or signaling in the brain, neurons, and/or CNS and/or diseases or disorders thereof: FASN; RXRA; NCOR2; ABCA1; NFKB2; IRF3; RELA; NOS2A; TLR4; TNF; RELB; LDLR; NR1H2; NFKB1; SREBF1; ILIR1; CCL2; IL6; MMP9; in the case of diseases or disorders associated with or involving aberrant, pathologic, and/or amyloid processing in the brain, neurons, and/or CNS and/or diseases or disorders thereof: PRKCE; CSNK1E; MAPK1; CAPNS1; AKT2; CAPN2; CAPN1; MAPK3; MAPK13; MAPT; MAPK14; AKT1; PSEN1; CSNK1A1; GSK3B; AKT3; APP; in the case of diseases or disorders associated with or involving aberrant, pathologic, and/or abnormal IL-4 activity, signaling, and/or regulation in the brain, neurons, and/or CNS and/or diseases or disorders thereof: AKT2; PIK3CA; PIK3CB; PIK3C3; IRS1; KRAS; SOCS1; PTPN6; NR3C1; PIK3C2A; JAK1; AKT1; JAK2; PIK3R1; FRAP1; AKT3; RPS6KB1; in the case of diseases or disorders associated with or involving aberrant, pathologic, and/or abnormal cell cycle: G2/M DNA damage checkpoint regulation activity, signaling, and/or regulation in the brain, neurons, and/or CNS and/or diseases or disorders thereof: EP300; PCAF; BRCA1; GADD45A; PLK1; BTRC; CHEK1; ATR; CHEK2; YWHAZ; TP53; CDKN1A; PRKDC; ATM; SFN; CDKN2A; in the case of diseases or disorders associated with or involving aberrant, pathologic, and/or abnormal purine metabolism signaling thereof, and/or regulation thereof in the brain, neurons, and/or CNS and/or diseases or disorders thereof: NME2; SMARCA4; MYH9; RRM2; ADAR; EIF2AK4; PKM2; ENTPD1; RAD51; RRM2B; TJP2; RAD51C; NT5E; POLD1; NME1; in the case of diseases or disorders associated with or involving aberrant, pathologic, and/or abnormal cAMP-mediated signaling and/or regulation in the brain, neurons, and/or CNS and/or diseases or disorders thereof: RAPIA; MAPK1; GNAS; CREB1; CAMK2A; MAPK3; SRC; RAFI; MAP2K2; STAT3; MAP2K1; BRAF; ATF4; in the case of diseases or disorders associated with or involving aberrant, pathologic, and/or abnormal mitochondrial function in the brain, neurons, and/or CNS and/or diseases or disorders thereof: SOD2; MAPK8; CASP8; MAPK10; MAPK9; CASP9; PARK7; PSEN1; PARK2; APP; CASP3; AIF; CytC; SMAC (Diablo); Aifm-1; Aifm-2; in the case of diseases or disorders associated with or involving aberrant, pathologic, and/or abnormal notch signaling and/or regulation in the brain, neurons, and/or CNS and/or diseases or disorders thereof: HES1; JAG1; NUMB; NOTCH4; ADAM17; NOTCH2; PSEN1; NOTCH3; NOTCH1; DLL4; in the case of diseases or disorders associated with or involving aberrant, pathologic, and/or abnormal endoplasmic reticulum stress pathway activity, signaling, and/or regulation in the brain, neurons, and/or CNS and/or diseases or disorders thereof: HSPA5; MAPK8; XBP1; TRAF2; ATF6; CASP9; ATF4; EIF2AK3; CASP3; in the case of diseases or disorders associated with or involving aberrant, pathologic, and/or abnormal pyrimidine metabolism, signaling thereof, and/or regulation thereof in the brain, neurons, and/or CNS and/or diseases or disorders thereof: NME2; AICDA; RRM2; EIF2AK4; ENTPD1; RRM2B; NT5E; POLD1; NME1; in the case of diseases or disorders associated with or involving aberrant, pathologic, and/or abnormal Parkinson's signaling in the brain, neurons, and/or CNS and/or diseases or disorders thereof: UCHL1; MAPK8; MAPK13; MAPK14; CASP9; PARK7; PARK2; CASP3; in the case of diseases or disorders associated with or involving aberrant, pathologic, and/or abnormal Glycolysis/Gluconeogenesis activity, signaling, and/or regulation in the brain, neurons, and/or CNS and/or diseases or disorders thereof: HK2; GCK; GPI; ALDH1A1; PKM2; LDHA; HK1; in the case of diseases or disorders associated with or involving aberrant, pathologic, and/or abnormal interferon activity, signaling, and/or regulation in the brain, neurons, and/or CNS and/or diseases or disorders thereof: IRF1; SOCS1; JAK1; JAK2; IFITM1; STAT1; IFIT3; in the case of diseases or disorders associated with or involving aberrant, pathologic, and/or abnormal sonic the hedgehog activity, signaling, and/or regulation in the brain, neurons, and/or CNS and/or diseases or disorders thereof: ARRB2; SMO; GLI2; DYRKIA; GLI1; GSK3B; DYRK1B; in the case of diseases or disorders associated with or involving aberrant, pathologic, and/or abnormal glycerophospholipid metabolism, signaling thereof, and/or regulation thereof in the brain, neurons, and/or CNS and/or diseases or disorders thereof: PLD1; GRN; GPAM; YWHAZ; SPHK1; SPHK2; in the case of diseases or disorders associated with or involving aberrant, pathologic, and/or abnormal phospholipid degradation, signaling thereof, and/or regulation thereof in the brain, neurons, and/or CNS and/or diseases or disorders thereof: PRDX6; PLD1; GRN; YWHAZ; SPHK1; SPHK2; in the case of diseases or disorders associated with or involving aberrant, pathologic, and/or abnormal tryptophan metabolism, signaling thereof, and/or regulation thereof in the brain, neurons, and/or CNS and/or diseases or disorders thereof: SIAH2; PRMT5; NEDD4; ALDH1A1; CYPIB1; SIAH1; in the case of diseases or disorders associated with or involving aberrant, pathologic, and/or abnormal lysine degradation, signaling thereof, and/or regulation thereof in the brain, neurons, and/or CNS and/or diseases or disorders thereof: SUV39H1; EHMT2; NSD1; SETD7; PPP2R5C; in the case of diseases or disorders associated with or involving aberrant, pathologic, and/or abnormal nucleotide excision repair pathway activity, signaling thereof, and/or regulation thereof in the brain, neurons, and/or CNS and/or diseases or disorders thereof: ERCC5; ERCC4; XPA; XPC; ERCC1; in the case of diseases or disorders associated with or involving aberrant, pathologic, and/or abnormal nucleotide starch and sucrose metabolism, signaling thereof, and/or regulation thereof in the brain, neurons, and/or CNS and/or diseases or disorders thereof: UCHL1; HK2; GCK; GPI; HK1; in the case of diseases or disorders associated with or involving aberrant, pathologic, and/or abnormal aminosugars metabolism, signaling thereof, and/or regulation thereof in the brain, neurons, and/or CNS and/or diseases or disorders thereof: NQO1; HK2; GCK; HK1; in the case of diseases or disorders associated with or involving aberrant, pathologic, and/or abnormal arachidonic acid metabolism, signaling thereof, and/or regulation thereof in the brain, neurons, and/or CNS and/or diseases or disorders thereof: PRDX6; GRN; YWHAZ; CYPIB1; in the case of diseases or disorders associated with or involving aberrant, pathologic, and/or abnormal circadian rhythm signaling and/or regulation in the brain, neurons, and/or CNS and/or diseases or disorders thereof: CSNK1E; CREB1; ATF4; NRID1; in the case of diseases or disorders associated with or involving aberrant, pathologic, and/or coagulation system activity signaling and/or regulation in the brain, neurons, and/or CNS and/or diseases or disorders thereof: BDKRB1; F2R; SERPINE1; F3; a PAR (e.g. PAR1, PAR2, etc.) PLC, aPC; in the case of diseases or disorders associated with or involving aberrant, pathologic, and/or abnormal dopamine receptor signaling and/or regulation in the brain, neurons, and/or CNS and/or diseases or disorders thereof: PPP2R1A; PPP2CA; PPPICC; PPP2R5C; in the case of diseases or disorders associated with or involving aberrant, pathologic, and/or abnormal Glutathione Metabolism signaling and/or regulation in the brain, neurons, and/or CNS and/or diseases or disorders thereof: IDH2; GSTP1; ANPEP; IDH1; in the case of diseases or disorders associated with or involving aberrant, pathologic, and/or abnormal Glycerolipid Metabolism signaling and/or regulation in the brain, neurons, and/or CNS and/or diseases or disorders thereof: ALDH1A1; GPAM; SPHK1; SPHK2; in the case of diseases or disorders associated with or involving aberrant, pathologic, and/or abnormal Linoleic Acid Metabolism signaling and/or regulation in the brain, neurons, and/or CNS and/or diseases or disorders thereof: PRDX6; GRN; YWHAZ; CYPIB1; in the case of diseases or disorders associated with or involving aberrant, pathologic, and/or abnormal Methionine Metabolism signaling and/or regulation in the brain, neurons, and/or CNS and/or diseases or disorders thereof: DNMT1; DNMT3B; AHCY; DNMT3A; in the case of diseases or disorders associated with or involving aberrant, pathologic, and/or abnormal Pyruvate Metabolism signaling and/or regulation in the brain, neurons, and/or CNS and/or diseases or disorders thereof: GLO1; ALDH1A1; PKM2; LDHA; in the case of diseases or disorders associated with or involving aberrant, pathologic, and/or abnormal Arginine and Proline Metabolism signaling and/or regulation in the brain, neurons, and/or CNS and/or diseases or disorders thereof: ALDH1A1; NOS3; NOS2A; in the case of diseases or disorders associated with or involving aberrant, pathologic, and/or abnormal Eicosanoid signaling and/or regulation in the brain, neurons, and/or CNS and/or diseases or disorders thereof: PRDX6; GRN; YWHAZ; in the case of diseases or disorders associated with or involving aberrant, pathologic, and/or abnormal fructose and mannose metabolism signaling and/or regulation in the brain, neurons, and/or CNS and/or diseases or disorders thereof: HK2; GCK; HK1; in the case of diseases or disorders associated with or involving aberrant, pathologic, and/or abnormal antigen presentation pathway activity, signaling and/or regulation in the brain, neurons, and/or CNS and/or diseases or disorders thereof: CALR; B2M; in the case of diseases or disorders associated with or involving aberrant, pathologic, and/or abnormal steroid biosynthesis in the brain, neurons, and/or CNS and/or diseases or disorders thereof: NQO1; DHCR7; in the case of diseases or disorders associated with or involving aberrant, pathologic, and/or abnormal butanoate metabolism in the brain, neurons, and/or CNS and/or diseases or disorders thereof: ALDH1A1; NLGN1; in the case of diseases or disorders associated with or involving an aberrant, pathologic, and/or abnormal citrate cycle in the brain, neurons, and/or CNS and/or diseases or disorders thereof: IDH2; IDH1; in the case of diseases or disorders associated with or involving aberrant, pathologic, and/or abnormal fatty acid metabolism in the brain, neurons, and/or CNS and/or diseases or disorders thereof: ALDH1A1; CYPIB1; in the case of diseases or disorders associated with or involving aberrant, pathologic, and/or abnormal Glycerophospholipid metabolism in the brain, neurons, and/or CNS and/or diseases or disorders thereof: PRDX6; CHKA; in the case of diseases or disorders associated with or involving aberrant, pathologic, and/or abnormal histidine metabolism in the brain, neurons, and/or CNS and/or diseases or disorders thereof: PRMT5; ALDH1A1; in the case of diseases or disorders associated with or involving aberrant, pathologic, and/or abnormal inositol metabolism in the brain, neurons, and/or CNS and/or diseases or disorders thereof: ERO1L; APEX1; in the case of diseases or disorders associated with or involving aberrant, pathologic, and/or abnormal Phenylalanine metabolism in the brain, neurons, and/or CNS and/or diseases or disorders thereof: PRDX6; PRDX1; in the case of diseases or disorders associated with or involving aberrant, pathologic, and/or abnormal Seleno amino acid metabolism in the brain, neurons, and/or CNS and/or diseases or disorders thereof: PRMT5; AHCY; in the case of diseases or disorders associated with or involving aberrant, pathologic, and/or abnormal Sphingolipid metabolism in the brain, neurons, and/or CNS and/or diseases or disorders thereof: SPHK1; SPHK2; in the case of diseases or disorders associated with or involving aberrant, pathologic, and/or abnormal Aminophosphonate metabolism in the brain, neurons, and/or CNS and/or diseases or disorders thereof: PRMT5; in the case of diseases or disorders associated with or involving aberrant, pathologic, and/or abnormal androgen and/or estrogen metabolism in the brain, neurons, and/or CNS and/or diseases or disorders thereof: PRMT5; in the case of diseases or disorders associated with or involving aberrant, pathologic, and/or abnormal Ascorbate and Aldarate metabolism in the brain, neurons, and/or CNS and/or diseases or disorders thereof: ALDH1A1; in the case of diseases or disorders associated with or involving aberrant, pathologic, and/or abnormal Cysteine Metabolism in the brain, neurons, and/or CNS and/or diseases or disorders thereof: LDHA; in the case of diseases or disorders associated with or involving aberrant, pathologic, and/or abnormal fatty acid biosynthesis in the brain, neurons, and/or CNS and/or diseases or disorders thereof: FASN; in the case of diseases or disorders associated with or involving aberrant, pathologic, and/or abnormal glutamate receptor signaling in the brain, neurons, and/or CNS and/or diseases or disorders thereof: GNB2L1; in the case of diseases or disorders associated with or involving aberrant, pathologic, and/or abnormal Pentose Phosphate pathway in the brain, neurons, and/or CNS and/or diseases or disorders thereof: GPI; in the case of diseases or disorders associated with or involving aberrant, pathologic, and/or abnormal retinol metabolism in the brain, neurons, and/or CNS and/or diseases or disorders thereof: ALDH1A1; in the case of diseases or disorders associated with or involving aberrant, pathologic, and/or abnormal Pentose and Glucuronate interconversions in the brain, neurons, and/or CNS and/or diseases or disorders thereof: UCHL1; in the case of diseases or disorders associated with or involving aberrant, pathologic, and/or abnormal Riboflavin Metabolism in the brain, neurons, and/or CNS and/or diseases or disorders thereof: TYR; in the case of diseases or disorders associated with or involving aberrant, pathologic, and/or abnormal Tyrosine Metabolism in the brain, neurons, and/or CNS and/or diseases or disorders thereof: PRMT5, TYR; in the case of diseases or disorders associated with or involving aberrant, pathologic, and/or abnormal Ubiquinone biosynthesis in the brain, neurons, and/or CNS and/or diseases or disorders thereof: PRMT5; in the case of diseases or disorders associated with or involving aberrant, pathologic, and/or abnormal Valine, leucine and isoleucine degradation in the brain, neurons, and/or CNS and/or diseases or disorders thereof: ALDH1A1; in the case of diseases or disorders associated with or involving aberrant, pathologic, and/or abnormal glycine, serine, and threonine metabolism in the brain, neurons, and/or CNS and/or diseases or disorders thereof: CHKA; in the case of diseases or disorders associated with or involving aberrant, pathologic, and/or abnormal lysine degradation in the brain, neurons, and/or CNS and/or diseases or disorders thereof: ALDH1A1; in the case of diseases or disorders associated with or involving aberrant, pathologic, and/or abnormal pain or pain signaling or pain signal generation in the brain, neurons, and/or CNS and/or diseases or disorders thereof: TRPM7; TRPC5; TRPC6; TRPC1; Cnr1; cnr2; Grk2; Trpal; Pomc; Cgrp; Crf; Pka; Era; Nr2b; TRPM5; Prkaca; Prkacb; Prkarla; Prkar2a; in the case of diseases or disorders associated with or involving aberrant, pathologic, and/or abnormal brain, neuron, and/or CNS development and/or diseases or disorders thereof: BMP-4; Chordin (Chrd); Noggin (Nog); WNT (Wnt2; Wnt2b; Wnt3a; Wnt4; Wnt5a; Wnt6; Wnt7b; Wnt8b; Wnt9a; Wnt9b; Wnt10a; Wnt10b; Wnt16); beta-catenin; Dkk-1; Frizzled related proteins; Otx-2; Gbx2; FGF-8; Reelin; Dab1; unc-86 (Pou4f1 or Brn3a); Numb; Re1n; in the case of diseases or disorders associated with or involving prion disorders of or in the brain, neuron, and/or CNS and/or diseases or disorders thereof: Prp; in the case of substance or activity additions involving activities of the brain, neuron, and/or CNS: Prkce (alcohol); Drd2; Drd4; ABAT (alcohol); GRIA2; Grm5; Grin1; Htr1b; Grin2a; Drd3; Pdyn; Gria1 (alcohol); in the case of diseases or disorders associated with or involving PI3K/AKT signaling and/or regulation thereof in the brain, neuron, and/or CNS and/or diseases or disorders thereof: PRKCE; ITGAM; ITGA5; IRAK1; PRKAA2; EIF2AK2; PTEN; EIF4E; PRKCZ; GRK6; MAPK1; TSC1; PLK1; AKT2; IKBKB; PIK3CA; CDK8; CDKN1B; NFKB2; BCL2; PIK3CB; PPP2R1A; MAPK8; BCL2L1; MAPK3; TSC2; ITGA1; KRAS; EIF4EBP1; RELA; PRKCD; NOS3; PRKAA1; MAPK9; CDK2; PPP2CA; PIM1; ITGB7; YWHAZ; ILK; TP53; RAFI; IKBKG; RELB; DYRKIA; CDKN1A; ITGB1; MAP2K2; JAK1; AKT1; JAK2; PIK3R1; CHUK; PDPK1; PPP2R5C; CTNNB1; MAP2K1; NFKB1; PAK3; ITGB3; CCND1; GSK3A; FRAP1; SFN; ITGA2; TTK; CSNKIA1; BRAF; GSK3B; AKT3; FOXO1; SGK; HSP90AA1; RPS6KB1; in the case of diseases or disorders associated with or involving ERK/MAPK signaling and/or regulation thereof in the brain, neuron, and/or CNS and/or diseases or disorders thereof: PRKCE; ITGAM; ITGA5; HSPB1; IRAK1; PRKAA2; EIF2AK2; RAC1; RAP1A; TLN1; EIF4E; ELK1; GRK6; MAPK1; RAC2; PLK1; AKT2; PIK3CA; CDK8; CREB1; PRKCI; PTK2; FOS; RPS6KA4; PIK3CB; PPP2R1A; PIK3C3; MAPK8; MAPK3; ITGAI; ETS1; KRAS; MYCN; EIF4EBP1; PPARG; PRKCD; PRKAA1; MAPK9; SRC; CDK2; PPP2CA; PIM1; PIK3C2A; ITGB7; YWHAZ; PPPICC; KSR1; PXN; RAF1; FYN; DYRKIA; ITGB1; MAP2K2; PAK4; PIK3R1; STAT3; PPP2R5C; MAP2K1; PAK3; ITGB3; ESR1; ITGA2; MYC; TTK; CSNKIA1; CRKL; BRAF; ATF4; PRKCA; SRF; STAT1; SGK; in the case of diseases or disorders associated with or involving glucocorticoid receptor signaling and/or regulation thereof in the brain, neuron, and/or CNS and/or diseases or disorders thereof: RAC1; TAF4B; EP300; SMAD2; TRAF6; PCAF; ELK1; MAPK1; SMAD3; AKT2; IKBKB; NCOR2; UBE2I; PIK3CA; CREB1; FOS; HSPA5; NFKB2; BCL2; MAP3K14; STAT5B; PIK3CB; PIK3C3; MAPK8; BCL2L1; MAPK3; TSC22D3; MAPK10; NRIP1; KRAS; MAPK13; RELA; STAT5A; MAPK9; NOS2A; PBX1; NR3C1; PIK3C2A; CDKN1C; TRAF2; SERPINE1; NCOA3; MAPK14; TNF; RAF1; IKBKG; MAP3K7; CREBBP; CDKN1A; MAP2K2; JAK1; IL8; NCOA2; AKT1; JAK2; PIK3R1; CHUK; STAT3; MAP2K1; NFKB1; TGFBR1; ESRI; SMAD4; CEBPB; JUN; AR; AKT3; CCL2; MMP1; STAT1; IL6; HSP90AA1; in the case of diseases or disorders associated with or involving ephrin receptor signaling and/or regulation thereof in the brain, neuron, and/or CNS and/or diseases or disorders thereof: PRKCE; ITGAM; ROCK1; ITGA5; CXCR4; IRAK1; PRKAA2; EIF2AK2; RAC1; RAP1A; GRK6; ROCK2; MAPK1; PGF; RAC2; PTPN11; GNAS; PLK1; AKT2; DOK1; CDK8; CREB1; PTK2; CFL1; GNAQ; MAP3K14; CXCL12; MAPK8; GNB2L1; ABL1; MAPK3; ITGAI; KRAS; RHOA; PRKCD; PRKAA1; MAPK9; SRC; CDK2; PIM1; ITGB7; PXN; RAF1; FYN; DYRKIA; ITGB1; MAP2K2; PAK4; AKT1; JAK2; STAT3; ADAM10; MAP2K1; PAK3; ITGB3; CDC42; VEGFA; ITGA2; EPHA8; TTK; CSNKIA1; CRKL; BRAF; PTPN13; ATF4; AKT3; SGK; in the case of diseases or disorders associated with or involving B cell receptor signaling and/or regulation thereof in the brain, neuron, and/or CNS and/or diseases or disorders thereof: RAC1; PTEN; LYN; ELK1; MAPK1; RAC2; PTPN11; AKT2; IKBKB; PIK3CA; CREB1; SYK; NFKB2; CAMK2A; MAP3K14; PIK3CB; PIK3C3; MAPK8; BCL2L1; ABL1; MAPK3; ETS1; KRAS; MAPK13; RELA; PTPN6; MAPK9; EGR1; PIK3C2A; BTK; MAPK14; RAF1; IKBKG; RELB; MAP3K7; MAP2K2; AKT1; PIK3R1; CHUK; MAP2K1; NFKB1; CDC42; GSK3A; FRAP1; BCL6; BCL10; JUN; GSK3B; ATF4; AKT3; VAV3; RPS6KB1; in the case of Infantile neuroaxonal dystroph: PLA2G6; in the case of Gaucher's disease: GBA; in the case of Krabbe disease: GALC; in the case of metachromatic leukodystrophy: ARSA and/or PRSP, isoform specific Saposin B replacement; in the case of Salla disease: SLC17A5; in the case of Farber disease or spinal muscular atrophy with progressive myoclonic epilepsy (also referred to as Jankovic-Rivera syndrome): ASAHI; in the case of Unverricht-Lundborg disease: CSTB; in the case of AADC deficiency: AADC; in the case of autosomal recessive forms of Parkinson's disease: PRKN, and others; in the case of Batten disease: CLN3; in the case of giant axonal neuropathy: GAN; in the case of mucopolysacchariodosis diseases (including MOS1H (Hurler syndrome), MPSII (Hunter syndrome), MPS III A-D: IDUA, IDS, SGSH, NAGLU, HGSNAT, GNS; in the case of Sandhoff disease (HEXB); in the case of GM2 gangliosidosis, AB variant: GM2A; in the case of Canavan disease: ASPA; in the case of cockayne syndrome: CSA or CSB; in the case of neurofibromatosis: NF1 or NF2; or any combination thereof.

[0213] Other diseases and disorders, as well as their associated genes, will be appreciated by those of skill in the art.

### EXAMPLES

### Example 1—AAV Capsids that Promote Transduction of CNS Tissue

[0214] Gene therapy has the potential to treat a wide range of central nervous system (CNS) diseases at their root cause. Adeno-associated viral (AAV) vectors can be used for gene replacement, gene editing, gene silencing, and to transactivate or repress gene transcription, and examples of each of these use cases have been validated in pre-clinical disease models. In addition, AAV vectors have been successfully used to delivery gene therapies to the CNS in humans. In a pioneering example of a systemically delivered gene therapy, AAV9 has been used to restore expression of the gene encoding the survival motor protein (SMN) protein to infants with a severe form of spinal muscular atrophy (SMA I). While this breakthrough gene therapy application has proven safe and effective in neonates, the wider implementation of systemic AAV9 for other CNS disorders is uncertain due to safety and efficacy concerns with high dose intravenous administration, especially in older individuals. Furthermore, even if high dose AAV-based therapy can be delivered safely, there is insufficient evidence that natural AAV serotypes such as AAV9 can achieve the wide-spread and efficient targeting of CNS cell types required for the treatment of many CNS diseases.

[0215] Applicants and others have shown that AAV capsids can be engineered to more efficiently cross the blood brain barrier (BBB) and transduce neurons and glia throughout the mouse CNS (Deverman, Chan, Kumar, Hanlon, Nonnenmacher). To date, none of these capsids developed through in vivo selections in mice has been reported to provide similar levels of enhanced transduction in non-human primates (NHPs).

[0216] Here, Applicants report the invention of novel 7-mer modified AAV capsids that more efficiently transduces cells throughout the CNS of the common marmoset, a species of new world primate. These capsids are engineered variants of AAV9-K449R (AA sequence: SEQ ID#1; NT sequence SEQ ID #2).

[0217] Through in vivo selection of AAV capsids that express the AAV cap mRNA in vivo, Applicants identified several capsid families that more efficiently transduce the CNS. First, A family of capsids defined by the 7-mer sequence motif (SEQ ID#3-16): 1 [ITQHKRVGEL] 2 [RNAKG] 3 [NIQMFLDTRVS] 4 [P] 5 [QNVST] 6 [E] 7 [FYH]. Second, Additional capsids with enhanced transduction of the marmoset CNS. Notably including AAV—BI—CNS-CJ13-17 (Tables 1, 2, and 3), which are enriched as compared with AAV9 in the marmoset and mouse CNS. These include 7-mer SEQ IDs 17-21.

[0218] A family of capsids, also known as the P×EF family, classified by a shared sequence motif within the engineered 7-mer insertion and exemplified by the AAV BI-103 capsid (also referenced as AAV-BI-CNS-CJ8, see Table 1), exhibits enhanced transduction of neurons and glia in all regions of the CNS relative to AAV9.

[0219] A core motif identified from an analysis of capsid 7-mers selected for transduction of the marmoset brain has the following features: a single positive charged amino acid (R or K) in position 1 OR 2, P at position 4, E at position 6, AND an amino acid with a single aromatic ring (F, Y, or H) at position 7. This is referred to as the [K/R] 1/2XPXE [FYH] motif. Additionally, certain amino acids are preferred at additional positions: 1 [ITQHKRVGEL], 2 [RNAKG], 3 [NIQMFLDTRVSP], 4 [P]. 5[QNVST]6 [E]. 7[FYH].

TABLE 1
[K/R]1/2-PXEF 7-mer insertion sequences
recovered from the brain and spinal
cord in round 3.

| | 7-mer | | Protein | Nucleotide |
|---|---|---|---|---|
| Capsid | SEQ ID# | 7-mer | SEQ ID# | SEQ ID#s |
| AAV-BI-CNS-CJ1 | SEQ ID #3 | ELNPREF | SEQ ID #22 | 41 to 50 |
| AAV-BI-CNS-CJ2 | SEQ ID #4 | GKLPREF | SEQ ID #23 | 51 to 60 |
| AAV-BI-CNS-CJ3 | SEQ ID #5 | HNFPNEF | SEQ ID #24 | 61 to 70 |
| AAV-BI-CNS-CJ4 | SEQ ID #6 | IRMPTEF | SEQ ID #25 | 71 to 80 |
| AAV-BI-CNS-CJ5 | SEQ ID #7 | IRQPQEF | SEQ ID #26 | 81 to 90 |
| AAV-BI-CNS-CJ6 | SEQ ID #8 | IRVPNEF | SEQ ID #27 | 91 to 100 |
| AAV-BI-CNS-CJ7 | SEQ ID #9 | KGPGYEH | SEQ ID #28 | 101 to 110 |
| AAV-BI-CNS-CJ8 | SEQ ID #10 | KNSPSEF | SEQ ID #29 | 111 to 120 |
| AAV-BI-CNS-CJ9 | SEQ ID #11 | LALPQEF | SEQ ID #30 | 121 to 130 |
| AAV-BI-CNS-CJ10 | SEQ ID #12 | QNIPSEY | SEQ ID #31 | 131 to 140 |
| AAV-BI-CNS-CJ11 | SEQ ID #13 | QRIPQEY | SEQ ID #32 | 141 to 150 |
| AAV-BI-CNS-CJ12 | SEQ ID #14 | RSQPQEH | SEQ ID #33 | 151 to 060 |
| AAV-BI-CNS-CJ13 | SEQ ID #15 | TARPNEY | SEQ ID #34 | 161 to 170 |
| AAV-BI-CNS-CJ14 | SEQ ID #16 | TRTPVEF | SEQ ID #35 | 171 to 180 |

TABLE 2
[K/R]1/2-PXEF 7-mer insertion sequences
enriched in the brain and spinal
cord in round 3.

| | 7-mer | | Protein | Nucleotide |
|---|---|---|---|---|
| Capsid | SEQ ID# | 7-mer | SEQ ID# | SEQ ID#s |
| AAV-BI-CNS-CJ3 | SEQ ID #5 | HNFPNEF | SEQ ID #24 | 61 to 70 |
| AAV-BI-CNS-CJ4 | SEQ ID #6 | IRMPTEF | SEQ ID #25 | 71 to 80 |
| AAV-BI-CNS-CJ5 | SEQ ID #7 | IRQPQEF | SEQ ID #26 | 81 to 90 |
| AAV-BI-CNS-CJ6 | SEQ ID #8 | IR VPNEF | SEQ ID #27 | 91 to 100 |
| AAV-BI-CNS-CJ7 | SEQ ID #9 | KGPGYEH | SEQ ID #28 | 101 to 110 |
| AAV-BI-CNS-CJ8 | SEQ ID #10 | KNSPSEF | SEQ ID #29 | 111 to 120 |
| AAV-BI-CNS-CJ11 | SEQ ID #13 | QRIPQEY | SEQ ID #32 | 141 to 150 |
| AAV-BI-CNS-CJ12 | SEQ ID #14 | RSQPQEH | SEQ ID #33 | 151 to 160 |
| AAV-BI-CNS-CJ14 | SEQ ID #16 | TRTPVEF | SEQ ID #35 | 171 to 180 |

TABLE 3
Additional 7-mer insertion sequences
enriched in the brain and spinal cord in
round 3.

| | 7-mer | | Protein | Nucleotide |
|---|---|---|---|---|
| Capsid | SEQ ID# | 7-mer | SEQ ID# | SEQ ID#s |
| AAV-BI-CNS-CJ15 | SEQ ID #17 | ENHTRDK | SEQ ID #36 | 181 to 190 |
| AAV-BI-CNS-CJ16 | SEQ ID #18 | GNDTRST | SEQ ID #37 | 191 to 200 |
| AAV-BI-CNS-CJ17 | SEQ ID #19 | MNSTISK | SEQ ID #38 | 201 to 210 |
| AAV-BI-CNS-CJ18 | SEQ ID #20 | QSRDLYR | SEQ ID #39 | 231 to 240 |
| AAV-BI-CNS-CJ19 | SEQ ID #21 | VNTVREF | SEQ ID #40 | 241 to 250 |

TABLE 4
SEQ ID Listing

| SEQ | | | |
|---|---|---|---|
| ID | | | |
| NO | Type | Organism | Sequence |
| 1 | PRT | Adeno- | MAADGYLPDWLEDNLSEGIREWWALKPGAPQPKANQQHQDNARGLVLPGY |
| | | Associated | KYLGPGNGLDKGEPVNAADAAALEHDKAYDQQLKAGDNPYLKYNHADAEF |
| | | Virus 9 | QERLKEDTSFGGNLGRAVFQAKKRLLEPLGLVEEAAKTAPGKKRPVEQSP |
| | | | QEPDSSAGIGKSGAQPAKKRLNFGQTGDTESVPDPQPIGEPPAAPSGVGS |
| | | | LTMASGGGAPVADNNEGADGVGSSSGNWHCDSQWLGDRVITTSTRTWALP |
| | | | TYNNHLYKQISNSTSGGSSNDNAYFGYSTPWGYFDFNRFHCHFSPRDWQR |
| | | | LINNNWGFRPKRLNFKLFNIQVKEVTDNNGVKTIANNLTSTVQVFTDSDY |
| | | | QLPYVLGSAHEGCLPPFPADVFMIPQYGYLTLNDGSQAVGRSSFYCLEYF |
| | | | PSQMLRTGNNFQFSYEFENVPFHSSYAHSQSLDRLMNPLIDQYLYYLSRT |
| | | | INGSGQNQQTLKFSVAGPSNMAVQGRNYIPGPSYRQQRVSTTVTQNNNSE |
| | | | FAWPGASSWALNGRNSLMNPGPAMASHKEGEDRFFPLSGSLIFGKQGTGR |
| | | | DNVDADKVMITNEEEIKTTNPVATESYGQVATNHQSAQAQAQTGWVQNQG |
| | | | ILPGMVWQDRDVYLQGPIWAKIPHTDGNFHPSPLMGGFGMKHPPPQILIK |
| | | | NTPVPADPPTAFNKDKLNSFITQYSTGQVSVEIEWELQKENSKRWNPEIQ |
| | | | YTSNYYKSNNVEFAVNTEGVYSEPRPIGTRYLTRNL |
| 2 | DNA | Adeno- | atggctgccgatggttatcttccagattggctcgaggacaaccttagtga |
| | | Associated | aggaattcgcgagtggtgggctttgaaacctggagcccctcaacccaagg |
| | | Virus 9 | caaatcaacaacatcaagacaacgctcgaggtcttgtgcttccgggttac |
| | | | aaataccttggacccggcaacggactcgacaagggggagccggtcaacgc |
| | | | agcagacgcggcggccctcgagcacgacaaggcctacgaccagcagctca |
| | | | aggccggagacaacccgtacctcaagtacaaccacgccgacgccgagttc |
| | | | caggagcggctcaaagaagatacgtcttttgggggcaacctcgggcgagc |
| | | | agtcttccaggccaaaaagaggcttcttgaacctcttggtctggttgagg |
| | | | aagcggctaagacggctcctggaaagaagaggcctgtagagcagtctcct |
| | | | caggaaccggactcctccgcgggtattggcaaatcgggtgcacagcccgc |
| | | | taaaaagagactcaatttcggtcagactggcgacacagagtcagtcccag |
| | | | accctcaaccaatcggagaacctcccgcagccccctcaggtgtgggatct |
| | | | cttacaatggcttcaggtggtggcgcaccagtggcagacaataacgaagg |
| | | | tgccgatggagtgggtagttcctcgggaaattggcattgcgattcccaat |
| | | | ggctgggggacagagtcatcaccaccagcacccgaacctgggccctgccc |
| | | | acctacaacaatcacctctacaagcaaatctccaacagcacatctggagg |
| | | | atcttcaaatgacaacgcctacttcggctacagcaccccctgggggtatt |
| | | | ttgacttcaacagattccactgccacttctcaccacgtgactggcagcga |
| | | | ctcatcaacaacaactggggattccggcctaagcgactcaacttcaagct |
| | | | cttcaacattcaggtcaaagaggttacggacaacaatggagtcaagacca |
| | | | tcgccaataaccttaccagcacggtccaggtcttcacggactcagactat |
| | | | cagctcccgtacgtgctcgggtcggctcacgagggctgcctcccgccgtt |
| | | | cccagcggacgttttcatgattcctcagtacgggtatctgacgcttaatg |
| | | | atggaagccaggccgtgggtcgttcgtccttttactgcctggaatatttc |
| | | | ccgtcgcaaatgctaagaacgggtaacaacttccagttcagctacgagtt |
| | | | tgagaacgtacctttccatagcagctacgctcacagccaaagcctggacc |
| | | | gactaatgaatccactcatcgaccaatacttgtactatctctcTaGAact |
| | | | attAACGGTTCTGGACAGAATCAAcaaacgctaaaattcagtgtggccgg |
| | | | acccagcaacatggctgtccagggaagaaactacatacctggacccagct |
| | | | accgacaacaacgtgtctcaaccactgtgactcaaaacaacaacagcgaa |
| | | | tttgcttggcctggagcttcttcttgggctctcaatggacgtaatagctt |
| | | | gatgaatcctggacctgctatggccagccacaaagaaggagaggaccgtt |
| | | | tctttcctttgtctggatctttaatttttggcaaacaaggTacCggCaga |
| | | | gacaacgtggatgcggacaaagtcatgataaccaacgaagaagaaattaa |
| | | | aactactaacccggtagcaacggagtcctatggacaagtggccacaaacc |
| | | | accagagtGCCCAAgcacaggcgcagaccggttgggttcaaaaccaagga |
| | | | atacttccgggtatggtttggcaggacagagatgtgtacctgcaaggacc |
| | | | catttgggccaaaattcctcacacggacggcaactttcacccttctccgc |
| | | | tgatgggagggtttggaatgaagcacccgcctcctcagatcctcatcaaa |
| | | | aacacacctgtacctgcggatcctccaacggccttcaacaaggacaagct |
| | | | gaactctttcatcacccagtattctactggccaagtcagcgtggagatcg |
| | | | agtgggagctgcagaaggaaaacagcaagcgctggaacccggagatccag |
| | | | tacacttccaactattacaagtctaataatgttgaatttgctgttaatac |
| | | | tgaaggtgtatatagtgaaccccgccccattggcaccagatacctgactc |
| | | | gtaatctg |
| 3 | PRT | Adeno- | ELNPREF |
| | | Associated | |
| | | Virus 9 | |
| 4 | PRT | Adeno- | GKLPREF |
| | | Associated | |
| | | Virus 9 | |
| 5 | PRT | Adeno- | HNFPNEF |
| | | Associated | |
| | | Virus 9 | |
| 6 | PRT | Adeno- | IRMPTEF |
| | | Associated | |
| | | Virus 9 | |
| 7 | PRT | Adeno- | IRQPQEF |
| | | Associated | |
| | | Virus 9 | |
| 8 | PRT | Adeno- | IRVPNEF |
| | | Associated | |
| | | Virus 9 | |
| 9 | PRT | Adeno- | KGPGYEH |
| | | Associated | |
| | | Virus 9 | |
| 10 | PRT | Adeno- | KNSPSEF |
| | | Associated | |
| | | Virus 9 | |
| 11 | PRT | Adeno- | LALPQEF |
| | | Associated | |
| | | Virus 9 | |
| 12 | PRT | Adeno- | QNIPSEY |
| | | Associated | |
| | | Virus 9 | |
| 13 | PRT | Adeno- | QRIPQEY |
| | | Associated | |
| | | Virus 9 | |
| 14 | PRT | Adeno- | RSQPQEH |
| | | Associated | |
| | | Virus 9 | |
| 15 | PRT | Adeno- | TARPNEY |
| | | Associated | |
| | | Virus 9 | |
| 16 | PRT | Adeno- | TRTPVEF |
| | | Associated | |
| | | Virus 9 | |
| 17 | PRT | Adeno- | ENHTRDK |
| | | Associated | |
| | | Virus 9 | |
| 18 | PRT | Adeno- | GNDTRST |
| | | Associated | |
| | | Virus 9 | |
| 19 | PRT | Adeno- | MNSTISK |
| | | Associated | |
| | | Virus 9 | |
| 20 | PRT | Adeno- | QSRDLYR |
| | | Associated | |
| | | Virus 9 | |
| 21 | PRT | Adeno- | VNTVREF |
| | | Associated | |
| | | Virus 9 | |
| 22 | PRT | Adeno- | MAADGYLPDWLEDNLSEGIREWWALKPGAPQPKANQQHQDNARGLVLPGY |
| | | Associated | KYLGPGNGLDKGEPVNAADAAALEHDKAYDQQLKAGDNPYLKYNHADAEF |
| | | Virus 9 | QERLKEDTSFGGNLGRAVFQAKKRLLEPLGLVEEAAKTAPGKKRPVEQSP |
| | | comprising | QEPDSSAGIGKSGAQPAKKRLNFGQTGDTESVPDPQPIGEPPAAPSGVGS |
| | | SEQ | LTMASGGGAPVADNNEGADGVGSSSGNWHCDSQWLGDRVITTSTRTWALP |
| | | ID NO: 3 | TYNNHLYKQISNSTSGGSSNDNAYFGYSTPWGYFDFNRFHCHFSPRDWQR |
| | | | LINNNWGFRPKRLNFKLFNIQVKEVTDNNGVKTIANNLTSTVQVFTDSDY |
| | | | QLPYVLGSAHEGCLPPFPADVFMIPQYGYLTLNDGSQAVGRSSFYCLEYF |
| | | | PSQMLRTGNNFQFSYEFENVPFHSSYAHSQSLDRLMNPLIDQYLYYLSRT |
| | | | INGSGQNQQTLKFSVAGPSNMAVQGRNYIPGPSYRQQRVSTTVTQNNNSE |
| | | | FAWPGASSWALNGRNSLMNPGPAMASHKEGEDRFFPLSGSLIFGKQGTGR |
| | | | DNVDADKVMITNEEEIKTTNPVATESYGQVATNHQSAQELNPREFAQAQT |
| | | | GWVQNQGILPGMVWQDRDVYLQGPIWAKIPHTDGNFHPSPLMGGFGMKHP |
| | | | PPQILIKNTPVPADPPTAFNKDKLNSFITQYSTGQVSVEIEWELQKENSK |
| | | | RWNPEIQYTSNYYKSNNVEFAVNTEGVYSEPRPIGTRYLTRNL |
| 23 | PRT | Adeno- | MAADGYLPDWLEDNLSEGIREWWALKPGAPQPKANQQHQDNARGLVLPGY |
| | | Associated | KYLGPGNGLDKGEPVNAADAAALEHDKAYDQQLKAGDNPYLKYNHADAEF |
| | | Virus 9 | QERLKEDTSFGGNLGRAVFQAKKRLLEPLGLVEEAAKTAPGKKRPVEQSP |
| | | comprising | QEPDSSAGIGKSGAQPAKKRLNFGQTGDTESVPDPQPIGEPPAAPSGVGS |
| | | SEQ | LTMASGGGAPVADNNEGADGVGSSSGNWHCDSQWLGDRVITTSTRTWALP |
| | | ID NO: 4 | TYNNHLYKQISNSTSGGSSNDNAYFGYSTPWGYFDFNRFHCHFSPRDWQR |
| | | | LINNNWGFRPKRLNFKLFNIQVKEVTDNNGVKTIANNLTSTVQVFTDSDY |
| | | | QLPYVLGSAHEGCLPPFPADVFMIPQYGYLTLNDGSQAVGRSSFYCLEYF |
| | | | PSQMLRTGNNFQFSYEFENVPFHSSYAHSQSLDRLMNPLIDQYLYYLSRT |
| | | | INGSGQNQQTLKFSVAGPSNMAVQGRNYIPGPSYRQQRVSTTVTQNNNSE |
| | | | FAWPGASSWALNGRNSLMNPGPAMASHKEGEDRFFPLSGSLIFGKQGTGR |
| | | | DNVDADKVMITNEEEIKTTNPVATESYGQVATNHQSAQGKLPREFAQAQT |
| | | | GWVQNQGILPGMVWQDRDVYLQGPIWAKIPHTDGNFHPSPLMGGFGMKHP |
| | | | PPQILIKNTPVPADPPTAFNKDKLNSFITQYSTGQVSVEIEWELQKENSK |
| | | | RWNPEIQYTSNYYKSNNVEFAVNTEGVYSEPRPIGTRYLTRNL |
| 24 | PRT | Adeno- | MAADGYLPDWLEDNLSEGIREWWALKPGAPQPKANQQHQDNARGLVLPGY |
| | | Associated | KYLGPGNGLDKGEPVNAADAAALEHDKAYDQQLKAGDNPYLKYNHADAEF |
| | | Virus 9 | QERLKEDTSFGGNLGRAVFQAKKRLLEPLGLVEEAAKTAPGKKRPVEQSP |
| | | comprising | QEPDSSAGIGKSGAQPAKKRLNFGQTGDTESVPDPQPIGEPPAAPSGVGS |
| | | SEQ | LTMASGGGAPVADNNEGADGVGSSSGNWHCDSQWLGDRVITTSTRTWALP |
| | | ID NO: 5 | TYNNHLYKQISNSTSGGSSNDNAYFGYSTPWGYFDFNRFHCHFSPRDWQR |
| | | | LINNNWGFRPKRLNFKLFNIQVKEVTDNNGVKTIANNLTSTVQVFTDSDY |
| | | | QLPYVLGSAHEGCLPPFPADVFMIPQYGYLTLNDGSQAVGRSSFYCLEYF |
| | | | PSQMLRTGNNFQFSYEFENVPFHSSYAHSQSLDRLMNPLIDQYLYYLSRT |
| | | | INGSGQNQQTLKFSVAGPSNMAVQGRNYIPGPSYRQQRVSTTVTQNNNSE |
| | | | FAWPGASSWALNGRNSLMNPGPAMASHKEGEDRFFPLSGSLIFGKQGTGR |
| | | | DNVDADKVMITNEEEIKTTNPVATESYGQVATNHQSAQHNFPNEFAQAQT |
| | | | GWVQNQGILPGMVWQDRDVYLQGPIWAKIPHTDGNFHPSPLMGGFGMKHP |
| | | | PPQILIKNTPVPADPPTAFNKDKLNSFITQYSTGQVSVEIEWELQKENSK |
| | | | RWNPEIQYTSNYYKSNNVEFAVNTEGVYSEPRPIGTRYLTRNL |
| 25 | PRT | Adeno- | MAADGYLPDWLEDNLSEGIREWWALKPGAPQPKANQQHQDNARGLVLPGY |
| | | Associated | KYLGPGNGLDKGEPVNAADAAALEHDKAYDQQLKAGDNPYLKYNHADAEF |
| | | Virus 9 | QERLKEDTSFGGNLGRAVFQAKKRLLEPLGLVEEAAKTAPGKKRPVEQSP |
| | | comprising | QEPDSSAGIGKSGAQPAKKRLNFGQTGDTESVPDPQPIGEPPAAPSGVGS |
| | | SEQ | LTMASGGGAPVADNNEGADGVGSSSGNWHCDSQWLGDRVITTSTRTWALP |
| | | ID NO: 6 | TYNNHLYKQISNSTSGGSSNDNAYFGYSTPWGYFDFNRFHCHFSPRDWQR |
| | | | LINNNWGFRPKRLNFKLFNIQVKEVTDNNGVKTIANNLTSTVQVFTDSDY |
| | | | QLPYVLGSAHEGCLPPFPADVFMIPQYGYLTLNDGSQAVGRSSFYCLEYF |
| | | | PSQMLRTGNNFQFSYEFENVPFHSSYAHSQSLDRLMNPLIDQYLYYLSRT |
| | | | INGSGQNQQTLKFSVAGPSNMAVQGRNYIPGPSYRQQRVSTTVTQNNNSE |
| | | | FAWPGASSWALNGRNSLMNPGPAMASHKEGEDRFFPLSGSLIFGKQGTGR |
| | | | DNVDADKVMITNEEEIKTTNPVATESYGQVATNHQSAQIRMPTEFAQAQT |
| | | | GWVQNQGILPGMVWQDRDVYLQGPIWAKIPHTDGNFHPSPLMGGFGMKHP |
| | | | PPQILIKNTPVPADPPTAFNKDKLNSFITQYSTGQVSVEIEWELQKENSK |
| | | | RWNPEIQYTSNYYKSNNVEFAVNTEGVYSEPRPIGTRYLTRNL |
| 26 | PRT | Adeno- | MAADGYLPDWLEDNLSEGIREWWALKPGAPQPKANQQHQDNARGLVLPGY |
| | | Associated | KYLGPGNGLDKGEPVNAADAAALEHDKAYDQQLKAGDNPYLKYNHADAEF |
| | | Virus 9 | QERLKEDTSFGGNLGRAVFQAKKRLLEPLGLVEEAAKTAPGKKRPVEQSP |
| | | comprising | QEPDSSAGIGKSGAQPAKKRLNFGQTGDTESVPDPQPIGEPPAAPSGVGS |
| | | SEQ | LTMASGGGAPVADNNEGADGVGSSSGNWHCDSQWLGDRVITTSTRTWALP |
| | | ID NO: 7 | TYNNHLYKQISNSTSGGSSNDNAYFGYSTPWGYFDFNRFHCHFSPRDWQR |
| | | | LINNNWGFRPKRLNFKLFNIQVKEVTDNNGVKTIANNLTSTVQVFTDSDY |
| | | | QLPYVLGSAHEGCLPPFPADVFMIPQYGYLTLNDGSQAVGRSSFYCLEYF |
| | | | PSQMLRTGNNFQFSYEFENVPFHSSYAHSQSLDRLMNPLIDQYLYYLSRT |
| | | | INGSGQNQQTLKFSVAGPSNMAVQGRNYIPGPSYRQQRVSTTVTQNNNSE |
| | | | FAWPGASSWALNGRNSLMNPGPAMASHKEGEDRFFPLSGSLIFGKQGTGR |
| | | | DNVDADKVMITNEEEIKTTNPVATESYGQVATNHQSAQIRQPQEFAQAQT |
| | | | GWVQNQGILPGMVWQDRDVYLQGPIWAKIPHTDGNFHPSPLMGGFGMKHP |
| | | | PPQILIKNTPVPADPPTAFNKDKLNSFITQYSTGQVSVEIEWELQKENSK |
| | | | RWNPEIQYTSNYYKSNNVEFAVNTEGVYSEPRPIGTRYLTRNL |
| 27 | PRT | Adeno- | MAADGYLPDWLEDNLSEGIREWWALKPGAPQPKANQQHQDNARGLVLPGY |
| | | Associated | KYLGPGNGLDKGEPVNAADAAALEHDKAYDQQLKAGDNPYLKYNHADAEF |
| | | Virus 9 | QERLKEDTSFGGNLGRAVFQAKKRLLEPLGLVEEAAKTAPGKKRPVEQSP |
| | | comprising | QEPDSSAGIGKSGAQPAKKRLNFGQTGDTESVPDPQPIGEPPAAPSGVGS |
| | | SEQ | LTMASGGGAPVADNNEGADGVGSSSGNWHCDSQWLGDRVITTSTRTWALP |
| | | ID NO: 8 | TYNNHLYKQISNSTSGGSSNDNAYFGYSTPWGYFDFNRFHCHFSPRDWQR |
| | | | LINNNWGFRPKRLNFKLFNIQVKEVTDNNGVKTIANNLTSTVQVFTDSDY |
| | | | QLPYVLGSAHEGCLPPFPADVFMIPQYGYLTLNDGSQAVGRSSFYCLEYF |
| | | | PSQMLRTGNNFQFSYEFENVPFHSSYAHSQSLDRLMNPLIDQYLYYLSRT |
| | | | INGSGQNQQTLKFSVAGPSNMAVQGRNYIPGPSYRQQRVSTTVTQNNNSE |
| | | | FAWPGASSWALNGRNSLMNPGPAMASHKEGEDRFFPLSGSLIFGKQGTGR |
| | | | DNVDADKVMITNEEEIKTTNPVATESYGQVATNHQSAQIRVPNEFAQAQT |
| | | | GWVQNQGILPGMVWQDRDVYLQGPIWAKIPHTDGNFHPSPLMGGFGMKHP |
| | | | PPQILIKNTPVPADPPTAFNKDKLNSFITQYSTGQVSVEIEWELQKENSK |
| | | | RWNPEIQYTSNYYKSNNVEFAVNTEGVYSEPRPIGTRYLTRNL |
| 28 | PRT | Adeno- | MAADGYLPDWLEDNLSEGIREWWALKPGAPQPKANQQHQDNARGLVLPGY |
| | | Associated | KYLGPGNGLDKGEPVNAADAAALEHDKAYDQQLKAGDNPYLKYNHADAEF |
| | | Virus 9 | QERLKEDTSFGGNLGRAVFQAKKRLLEPLGLVEEAAKTAPGKKRPVEQSP |
| | | comprising | QEPDSSAGIGKSGAQPAKKRLNFGQTGDTESVPDPQPIGEPPAAPSGVGS |
| | | SEQ | LTMASGGGAPVADNNEGADGVGSSSGNWHCDSQWLGDRVITTSTRTWALP |
| | | ID NO: 9 | TYNNHLYKQISNSTSGGSSNDNAYFGYSTPWGYFDFNRFHCHFSPRDWQR |
| | | | LINNNWGFRPKRLNFKLFNIQVKEVTDNNGVKTIANNLTSTVQVFTDSDY |
| | | | QLPYVLGSAHEGCLPPFPADVFMIPQYGYLTLNDGSQAVGRSSFYCLEYF |
| | | | PSQMLRTGNNFQFSYEFENVPFHSSYAHSQSLDRLMNPLIDQYLYYLSRT |
| | | | INGSGQNQQTLKFSVAGPSNMAVQGRNYIPGPSYRQQRVSTTVTQNNNSE |
| | | | FAWPGASSWALNGRNSLMNPGPAMASHKEGEDRFFPLSGSLIFGKQGTGR |
| | | | DNVDADKVMITNEEEIKTTNPVATESYGQVATNHQSAQKGPGYEHAQAQT |
| | | | GWVQNQGILPGMVWQDRDVYLQGPIWAKIPHTDGNFHPSPLMGGFGMKHP |
| | | | PPQILIKNTPVPADPPTAFNKDKLNSFITQYSTGQVSVEIEWELQKENSK |
| | | | RWNPEIQYTSNYYKSNNVEFAVNTEGVYSEPRPIGTRYLTRNL |
| 29 | PRT | Adeno- | MAADGYLPDWLEDNLSEGIREWWALKPGAPQPKANQQHQDNARGLVLPGY |
| | | Associated | KYLGPGNGLDKGEPVNAADAAALEHDKAYDQQLKAGDNPYLKYNHADAEF |
| | | Virus 9 | QERLKEDTSFGGNLGRAVFQAKKRLLEPLGLVEEAAKTAPGKKRPVEQSP |
| | | comprising | QEPDSSAGIGKSGAQPAKKRLNFGQTGDTESVPDPQPIGEPPAAPSGVGS |
| | | SEQ | LTMASGGGAPVADNNEGADGVGSSSGNWHCDSQWLGDRVITTSTRTWALP |
| | | ID NO: 10 | TYNNHLYKQISNSTSGGSSNDNAYFGYSTPWGYFDFNRFHCHFSPRDWQR |
| | | | LINNNWGFRPKRLNFKLFNIQVKEVTDNNGVKTIANNLTSTVQVFTDSDY |
| | | | QLPYVLGSAHEGCLPPFPADVFMIPQYGYLTLNDGSQAVGRSSFYCLEYF |
| | | | PSQMLRTGNNFQFSYEFENVPFHSSYAHSQSLDRLMNPLIDQYLYYLSRT |
| | | | INGSGQNQQTLKFSVAGPSNMAVQGRNYIPGPSYRQQRVSTTVTQNNNSE |
| | | | FAWPGASSWALNGRNSLMNPGPAMASHKEGEDRFFPLSGSLIFGKQGTGR |
| | | | DNVDADKVMITNEEEIKTTNPVATESYGQVATNHQSAQKNSPSEFAQAQT |
| | | | GWVQNQGILPGMVWQDRDVYLQGPIWAKIPHTDGNFHPSPLMGGFGMKHP |
| | | | PPQILIKNTPVPADPPTAFNKDKLNSFITQYSTGQVSVEIEWELQKENSK |
| | | | RWNPEIQYTSNYYKSNNVEFAVNTEGVYSEPRPIGTRYLTRNL |
| 30 | PRT | Adeno- | MAADGYLPDWLEDNLSEGIREWWALKPGAPQPKANQQHQDNARGLVLPGY |
| | | Associated | KYLGPGNGLDKGEPVNAADAAALEHDKAYDQQLKAGDNPYLKYNHADAEF |
| | | Virus 9 | QERLKEDTSFGGNLGRAVFQAKKRLLEPLGLVEEAAKTAPGKKRPVEQSP |
| | | comprising | QEPDSSAGIGKSGAQPAKKRLNFGQTGDTESVPDPQPIGEPPAAPSGVGS |
| | | SEQ | LTMASGGGAPVADNNEGADGVGSSSGNWHCDSQWLGDRVITTSTRTWALP |
| | | ID NO: 11 | TYNNHLYKQISNSTSGGSSNDNAYFGYSTPWGYFDFNRFHCHFSPRDWQR |
| | | | LINNNWGFRPKRLNFKLFNIQVKEVTDNNGVKTIANNLTSTVQVFTDSDY |
| | | | QLPYVLGSAHEGCLPPFPADVFMIPQYGYLTLNDGSQAVGRSSFYCLEYF |
| | | | PSQMLRTGNNFQFSYEFENVPFHSSYAHSQSLDRLMNPLIDQYLYYLSRT |
| | | | INGSGQNQQTLKFSVAGPSNMAVQGRNYIPGPSYRQQRVSTTVTQNNNSE |
| | | | FAWPGASSWALNGRNSLMNPGPAMASHKEGEDRFFPLSGSLIFGKQGTGR |
| | | | DNVDADKVMITNEEEIKTTNPVATESYGQVATNHQSAQLALPQEFAQAQT |
| | | | GWVQNQGILPGMVWQDRDVYLQGPIWAKIPHTDGNFHPSPLMGGFGMKHP |
| | | | PPQILIKNTPVPADPPTAFNKDKLNSFITQYSTGQVSVEIEWELQKENSK |
| | | | RWNPEIQYTSNYYKSNNVEFAVNTEGVYSEPRPIGTRYLTRNL |
| 31 | PRT | Adeno- | MAADGYLPDWLEDNLSEGIREWWALKPGAPQPKANQQHQDNARGLVLPGY |
| | | Associated | KYLGPGNGLDKGEPVNAADAAALEHDKAYDQQLKAGDNPYLKYNHADAEF |
| | | Virus 9 | QERLKEDTSFGGNLGRAVFQAKKRLLEPLGLVEEAAKTAPGKKRPVEQSP |
| | | comprising | QEPDSSAGIGKSGAQPAKKRLNFGQTGDTESVPDPQPIGEPPAAPSGVGS |
| | | SEQ | LTMASGGGAPVADNNEGADGVGSSSGNWHCDSQWLGDRVITTSTRTWALP |
| | | ID NO: 12 | TYNNHLYKQISNSTSGGSSNDNAYFGYSTPWGYFDFNRFHCHFSPRDWQR |
| | | | LINNNWGFRPKRLNFKLFNIQVKEVTDNNGVKTIANNLTSTVQVFTDSDY |
| | | | QLPYVLGSAHEGCLPPFPADVFMIPQYGYLTLNDGSQAVGRSSFYCLEYF |
| | | | PSQMLRTGNNFQFSYEFENVPFHSSYAHSQSLDRLMNPLIDQYLYYLSRT |
| | | | INGSGQNQQTLKFSVAGPSNMAVQGRNYIPGPSYRQQRVSTTVTQNNNSE |
| | | | FAWPGASSWALNGRNSLMNPGPAMASHKEGEDRFFPLSGSLIFGKQGTGR |
| | | | DNVDADKVMITNEEEIKTTNPVATESYGQVATNHQSAQQNIPSEYAQAQT |
| | | | GWVQNQGILPGMVWQDRDVYLQGPIWAKIPHTDGNFHPSPLMGGFGMKHP |
| | | | PPQILIKNTPVPADPPTAFNKDKLNSFITQYSTGQVSVEIEWELQKENSK |
| | | | RWNPEIQYTSNYYKSNNVEFAVNTEGVYSEPRPIGTRYLTRNL |
| 32 | PRT | Adeno- | MAADGYLPDWLEDNLSEGIREWWALKPGAPQPKANQQHQDNARGLVLPGY |
| | | Associated | KYLGPGNGLDKGEPVNAADAAALEHDKAYDQQLKAGDNPYLKYNHADAEF |
| | | Virus 9 | QERLKEDTSFGGNLGRAVFQAKKRLLEPLGLVEEAAKTAPGKKRPVEQSP |
| | | comprising | QEPDSSAGIGKSGAQPAKKRLNFGQTGDTESVPDPQPIGEPPAAPSGVGS |
| | | SEQ | LTMASGGGAPVADNNEGADGVGSSSGNWHCDSQWLGDRVITTSTRTWALP |
| | | ID NO: 13 | TYNNHLYKQISNSTSGGSSNDNAYFGYSTPWGYFDFNRFHCHFSPRDWQR |
| | | | LINNNWGFRPKRLNFKLFNIQVKEVTDNNGVKTIANNLTSTVQVFTDSDY |
| | | | QLPYVLGSAHEGCLPPFPADVFMIPQYGYLTLNDGSQAVGRSSFYCLEYF |
| | | | PSQMLRTGNNFQFSYEFENVPFHSSYAHSQSLDRLMNPLIDQYLYYLSRT |
| | | | INGSGQNQQTLKFSVAGPSNMAVQGRNYIPGPSYRQQRVSTTVTQNNNSE |
| | | | FAWPGASSWALNGRNSLMNPGPAMASHKEGEDRFFPLSGSLIFGKQGTGR |
| | | | DNVDADKVMITNEEEIKTTNPVATESYGQVATNHQSAQQRIPQEYAQAQT |
| | | | GWVQNQGILPGMVWQDRDVYLQGPIWAKIPHTDGNFHPSPLMGGFGMKHP |
| | | | PPQILIKNTPVPADPPTAFNKDKLNSFITQYSTGQVSVEIEWELQKENSK |
| | | | RWNPEIQYTSNYYKSNNVEFAVNTEGVYSEPRPIGTRYLTRNL |
| 33 | PRT | Adeno- | MAADGYLPDWLEDNLSEGIREWWALKPGAPQPKANQQHQDNARGLVLPGY |
| | | Associated | KYLGPGNGLDKGEPVNAADAAALEHDKAYDQQLKAGDNPYLKYNHADAEF |
| | | Virus 9 | QERLKEDTSFGGNLGRAVFQAKKRLLEPLGLVEEAAKTAPGKKRPVEQSP |
| | | comprising | QEPDSSAGIGKSGAQPAKKRLNFGQTGDTESVPDPQPIGEPPAAPSGVGS |
| | | SEQ | LTMASGGGAPVADNNEGADGVGSSSGNWHCDSQWLGDRVITTSTRTWALP |
| | | ID NO: 14 | TYNNHLYKQISNSTSGGSSNDNAYFGYSTPWGYFDFNRFHCHFSPRDWQR |
| | | | LINNNWGFRPKRLNFKLFNIQVKEVTDNNGVKTIANNLTSTVQVFTDSDY |
| | | | QLPYVLGSAHEGCLPPFPADVFMIPQYGYLTLNDGSQAVGRSSFYCLEYF |
| | | | PSQMLRTGNNFQFSYEFENVPFHSSYAHSQSLDRLMNPLIDQYLYYLSRT |
| | | | INGSGQNQQTLKFSVAGPSNMAVQGRNYIPGPSYRQQRVSTTVTQNNNSE |
| | | | FAWPGASSWALNGRNSLMNPGPAMASHKEGEDRFFPLSGSLIFGKQGTGR |
| | | | DNVDADKVMITNEEEIKTTNPVATESYGQVATNHQSAQRSQPQEHAQAQT |
| | | | GWVQNQGILPGMVWQDRDVYLQGPIWAKIPHTDGNFHPSPLMGGFGMKHP |
| | | | PPQILIKNTPVPADPPTAFNKDKLNSFITQYSTGQVSVEIEWELQKENSK |
| | | | RWNPEIQYTSNYYKSNNVEFAVNTEGVYSEPRPIGTRYLTRNL |
| 34 | PRT | Adeno- | MAADGYLPDWLEDNLSEGIREWWALKPGAPQPKANQQHQDNARGLVLPGY |
| | | Associated | KYLGPGNGLDKGEPVNAADAAALEHDKAYDQQLKAGDNPYLKYNHADAEF |
| | | Virus 9 | QERLKEDTSFGGNLGRAVFQAKKRLLEPLGLVEEAAKTAPGKKRPVEQSP |
| | | comprising | QEPDSSAGIGKSGAQPAKKRLNFGQTGDTESVPDPQPIGEPPAAPSGVGS |
| | | SEQ | LTMASGGGAPVADNNEGADGVGSSSGNWHCDSQWLGDRVITTSTRTWALP |
| | | ID NO: 15 | TYNNHLYKQISNSTSGGSSNDNAYFGYSTPWGYFDFNRFHCHFSPRDWQR |
| | | | LINNNWGFRPKRLNFKLFNIQVKEVTDNNGVKTIANNLTSTVQVFTDSDY |
| | | | QLPYVLGSAHEGCLPPFPADVFMIPQYGYLTLNDGSQAVGRSSFYCLEYF |
| | | | PSQMLRTGNNFQFSYEFENVPFHSSYAHSQSLDRLMNPLIDQYLYYLSRT |
| | | | INGSGQNQQTLKFSVAGPSNMAVQGRNYIPGPSYRQQRVSTTVTQNNNSE |
| | | | FAWPGASSWALNGRNSLMNPGPAMASHKEGEDRFFPLSGSLIFGKQGTGR |
| | | | DNVDADKVMITNEEEIKTTNPVATESYGQVATNHQSAQTARPNEYAQAQT |
| | | | GWVQNQGILPGMVWQDRDVYLQGPIWAKIPHTDGNFHPSPLMGGFGMKHP |
| | | | PPQILIKNTPVPADPPTAFNKDKLNSFITQYSTGQVSVEIEWELQKENSK |
| | | | RWNPEIQYTSNYYKSNNVEFAVNTEGVYSEPRPIGTRYLTRNL |
| 35 | PRT | Adeno- | MAADGYLPDWLEDNLSEGIREWWALKPGAPQPKANQQHQDNARGLVLPGY |
| | | Associated | KYLGPGNGLDKGEPVNAADAAALEHDKAYDQQLKAGDNPYLKYNHADAEF |
| | | Virus 9 | QERLKEDTSFGGNLGRAVFQAKKRLLEPLGLVEEAAKTAPGKKRPVEQSP |
| | | comprising | QEPDSSAGIGKSGAQPAKKRLNFGQTGDTESVPDPQPIGEPPAAPSGVGS |
| | | SEQ | LTMASGGGAPVADNNEGADGVGSSSGNWHCDSQWLGDRVITTSTRTWALP |
| | | ID NO: 16 | TYNNHLYKQISNSTSGGSSNDNAYFGYSTPWGYFDFNRFHCHFSPRDWQR |
| | | | LINNNWGFRPKRLNFKLFNIQVKEVTDNNGVKTIANNLTSTVQVFTDSDY |
| | | | QLPYVLGSAHEGCLPPFPADVFMIPQYGYLTLNDGSQAVGRSSFYCLEYF |
| | | | PSQMLRTGNNFQFSYEFENVPFHSSYAHSQSLDRLMNPLIDQYLYYLSRT |
| | | | INGSGQNQQTLKFSVAGPSNMAVQGRNYIPGPSYRQQRVSTTVTQNNNSE |
| | | | FAWPGASSWALNGRNSLMNPGPAMASHKEGEDRFFPLSGSLIFGKQGTGR |
| | | | DNVDADKVMITNEEEIKTTNPVATESYGQVATNHQSAQTRTPVEFAQAQT |
| | | | GWVQNQGILPGMVWQDRDVYLQGPIWAKIPHTDGNFHPSPLMGGFGMKHP |
| | | | PPQILIKNTPVPADPPTAFNKDKLNSFITQYSTGQVSVEIEWELQKENSK |
| | | | RWNPEIQYTSNYYKSNNVEFAVNTEGVYSEPRPIGTRYLTRNL |
| 36 | PRT | Adeno- | MAADGYLPDWLEDNLSEGIREWWALKPGAPQPKANQQHQDNARGLVLPGY |
| | | Associated | KYLGPGNGLDKGEPVNAADAAALEHDKAYDQQLKAGDNPYLKYNHADAEF |
| | | Virus 9 | QERLKEDTSFGGNLGRAVFQAKKRLLEPLGLVEEAAKTAPGKKRPVEQSP |
| | | comprising | QEPDSSAGIGKSGAQPAKKRLNFGQTGDTESVPDPQPIGEPPAAPSGVGS |
| | | SEQ | LTMASGGGAPVADNNEGADGVGSSSGNWHCDSQWLGDRVITTSTRTWALP |
| | | ID NO: 17 | TYNNHLYKQISNSTSGGSSNDNAYFGYSTPWGYFDFNRFHCHFSPRDWQR |
| | | | LINNNWGFRPKRLNFKLFNIQVKEVTDNNGVKTIANNLTSTVQVFTDSDY |
| | | | QLPYVLGSAHEGCLPPFPADVFMIPQYGYLTLNDGSQAVGRSSFYCLEYF |
| | | | PSQMLRTGNNFQFSYEFENVPFHSSYAHSQSLDRLMNPLIDQYLYYLSRT |
| | | | INGSGQNQQTLKFSVAGPSNMAVQGRNYIPGPSYRQQRVSTTVTQNNNSE |
| | | | FAWPGASSWALNGRNSLMNPGPAMASHKEGEDRFFPLSGSLIFGKQGTGR |
| | | | DNVDADKVMITNEEEIKTTNPVATESYGQVATNHQSAQENHTRDKAQAQT |
| | | | GWVQNQGILPGMVWQDRDVYLQGPIWAKIPHTDGNFHPSPLMGGFGMKHP |
| | | | PPQILIKNTPVPADPPTAFNKDKLNSFITQYSTGQVSVEIEWELQKENSK |
| | | | RWNPEIQYTSNYYKSNNVEFAVNTEGVYSEPRPIGTRYLTRNL |
| 37 | PRT | Adeno- | MAADGYLPDWLEDNLSEGIREWWALKPGAPQPKANQQHQDNARGLVLPGY |
| | | Associated | KYLGPGNGLDKGEPVNAADAAALEHDKAYDQQLKAGDNPYLKYNHADAEF |
| | | Virus 9 | QERLKEDTSFGGNLGRAVFQAKKRLLEPLGLVEEAAKTAPGKKRPVEQSP |
| | | comprising | QEPDSSAGIGKSGAQPAKKRLNFGQTGDTESVPDPQPIGEPPAAPSGVGS |
| | | SEQ | LTMASGGGAPVADNNEGADGVGSSSGNWHCDSQWLGDRVITTSTRTWALP |
| | | ID NO: 18 | TYNNHLYKQISNSTSGGSSNDNAYFGYSTPWGYFDFNRFHCHFSPRDWQR |
| | | | LINNNWGFRPKRLNFKLFNIQVKEVTDNNGVKTIANNLTSTVQVFTDSDY |
| | | | QLPYVLGSAHEGCLPPFPADVFMIPQYGYLTLNDGSQAVGRSSFYCLEYF |
| | | | PSQMLRTGNNFQFSYEFENVPFHSSYAHSQSLDRLMNPLIDQYLYYLSRT |
| | | | INGSGQNQQTLKFSVAGPSNMAVQGRNYIPGPSYRQQRVSTTVTQNNNSE |
| | | | FAWPGASSWALNGRNSLMNPGPAMASHKEGEDRFFPLSGSLIFGKQGTGR |
| | | | DNVDADKVMITNEEEIKTTNPVATESYGQVATNHQSAQGNDTRSTAQAQT |
| | | | GWVQNQGILPGMVWQDRDVYLQGPIWAKIPHTDGNFHPSPLMGGFGMKHP |
| | | | PPQILIKNTPVPADPPTAFNKDKLNSFITQYSTGQVSVEIEWELQKENSK |
| | | | RWNPEIQYTSNYYKSNNVEFAVNTEGVYSEPRPIGTRYLTRNL |
| 38 | PRT | Adeno- | MAADGYLPDWLEDNLSEGIREWWALKPGAPQPKANQQHQDNARGLVLPGY |
| | | Associated | KYLGPGNGLDKGEPVNAADAAALEHDKAYDQQLKAGDNPYLKYNHADAEF |
| | | Virus 9 | QERLKEDTSFGGNLGRAVFQAKKRLLEPLGLVEEAAKTAPGKKRPVEQSP |
| | | comprising | QEPDSSAGIGKSGAQPAKKRLNFGQTGDTESVPDPQPIGEPPAAPSGVGS |
| | | SEQ | LTMASGGGAPVADNNEGADGVGSSSGNWHCDSQWLGDRVITTSTRTWALP |
| | | ID NO: 19 | TYNNHLYKQISNSTSGGSSNDNAYFGYSTPWGYFDFNRFHCHFSPRDWQR |
| | | | LINNNWGFRPKRLNFKLFNIQVKEVTDNNGVKTIANNLTSTVQVFTDSDY |
| | | | QLPYVLGSAHEGCLPPFPADVFMIPQYGYLTLNDGSQAVGRSSFYCLEYF |
| | | | PSQMLRTGNNFQFSYEFENVPFHSSYAHSQSLDRLMNPLIDQYLYYLSRT |
| | | | INGSGQNQQTLKFSVAGPSNMAVQGRNYIPGPSYRQQRVSTTVTQNNNSE |
| | | | FAWPGASSWALNGRNSLMNPGPAMASHKEGEDRFFPLSGSLIFGKQGTGR |
| | | | DNVDADKVMITNEEEIKTTNPVATESYGQVATNHQSAQMNSTISKAQAQT |
| | | | GWVQNQGILPGMVWQDRDVYLQGPIWAKIPHTDGNFHPSPLMGGFGMKHP |
| | | | PPQILIKNTPVPADPPTAFNKDKLNSFITQYSTGQVSVEIEWELQKENSK |
| | | | RWNPEIQYTSNYYKSNNVEFAVNTEGVYSEPRPIGTRYLTRNL |
| 39 | PRT | Adeno- | MAADGYLPDWLEDNLSEGIREWWALKPGAPQPKANQQHQDNARGLVLPGY |
| | | Associated | KYLGPGNGLDKGEPVNAADAAALEHDKAYDQQLKAGDNPYLKYNHADAEF |
| | | Virus 9 | QERLKEDTSFGGNLGRAVFQAKKRLLEPLGLVEEAAKTAPGKKRPVEQSP |
| | | comprising | QEPDSSAGIGKSGAQPAKKRLNFGQTGDTESVPDPQPIGEPPAAPSGVGS |
| | | SEQ | LTMASGGGAPVADNNEGADGVGSSSGNWHCDSQWLGDRVITTSTRTWALP |
| | | ID NO: 20 | TYNNHLYKQISNSTSGGSSNDNAYFGYSTPWGYFDFNRFHCHFSPRDWQR |
| | | | LINNNWGFRPKRLNFKLFNIQVKEVTDNNGVKTIANNLTSTVQVFTDSDY |
| | | | QLPYVLGSAHEGCLPPFPADVFMIPQYGYLTLNDGSQAVGRSSFYCLEYF |
| | | | PSQMLRTGNNFQFSYEFENVPFHSSYAHSQSLDRLMNPLIDQYLYYLSRT |
| | | | INGSGQNQQTLKFSVAGPSNMAVQGRNYIPGPSYRQQRVSTTVTQNNNSE |
| | | | FAWPGASSWALNGRNSLMNPGPAMASHKEGEDRFFPLSGSLIFGKQGTGR |
| | | | DNVDADKVMITNEEEIKTTNPVATESYGQVATNHQSAQQSRDLYRAQAQT |
| | | | GWVQNQGILPGMVWQDRDVYLQGPIWAKIPHTDGNFHPSPLMGGFGMKHP |
| | | | PPQILIKNTPVPADPPTAFNKDKLNSFITQYSTGQVSVEIEWELQKENSK |
| | | | RWNPEIQYTSNYYKSNNVEFAVNTEGVYSEPRPIGTRYLTRNL |
| 40 | PRT | Adeno- | MAADGYLPDWLEDNLSEGIREWWALKPGAPQPKANQQHQDNARGLVLPGY |
| | | Associated | KYLGPGNGLDKGEPVNAADAAALEHDKAYDQQLKAGDNPYLKYNHADAEF |
| | | Virus 9 | QERLKEDTSFGGNLGRAVFQAKKRLLEPLGLVEEAAKTAPGKKRPVEQSP |
| | | comprising | QEPDSSAGIGKSGAQPAKKRLNFGQTGDTESVPDPQPIGEPPAAPSGVGS |
| | | SEQ | LTMASGGGAPVADNNEGADGVGSSSGNWHCDSQWLGDRVITTSTRTWALP |
| | | ID NO: 21 | TYNNHLYKQISNSTSGGSSNDNAYFGYSTPWGYFDFNRFHCHFSPRDWQR |
| | | | LINNNWGFRPKRLNFKLFNIQVKEVTDNNGVKTIANNLTSTVQVFTDSDY |
| | | | QLPYVLGSAHEGCLPPFPADVFMIPQYGYLTLNDGSQAVGRSSFYCLEYF |
| | | | PSQMLRTGNNFQFSYEFENVPFHSSYAHSQSLDRLMNPLIDQYLYYLSRT |
| | | | INGSGQNQQTLKFSVAGPSNMAVQGRNYIPGPSYRQQRVSTTVTQNNNSE |
| | | | FAWPGASSWALNGRNSLMNPGPAMASHKEGEDRFFPLSGSLIFGKQGTGR |
| | | | DNVDADKVMITNEEEIKTTNPVATESYGQVATNHQSAQVNTVREFAQAQT |
| | | | GWVQNQGILPGMVWQDRDVYLQGPIWAKIPHTDGNFHPSPLMGGFGMKHP |
| | | | PPQILIKNTPVPADPPTAFNKDKLNSFITQYSTGQVSVEIEWELQKENSK |
| | | | RWNPEIQYTSNYYKSNNVEFAVNTEGVYSEPRPIGTRYLTRNL |
| 41 | DNA | Adeno- | atggctgccgatggttatcttccagattggctcgaggacaaccttagtga |
| | | Associated | aggaattcgcgagtggtgggctttgaaacctggagcccctcaacccaagg |
| | | Virus 9 | caaatcaacaacatcaagacaacgctcgaggtcttgtgcttccgggttac |
| | | comprising | aaataccttggacccggcaacggactcgacaagggggagccggtcaacgc |
| | | SEQ | agcagacgcggcggccctcgagcacgacaaggcctacgaccagcagctca |
| | | ID NO: 3 | aggccggagacaacccgtacctcaagtacaaccacgccgacgccgagttc |
| | | | caggagcggctcaaagaagatacgtcttttgggggcaacctcgggcgagc |
| | | | agtcttccaggccaaaaagaggcttcttgaacctcttggtctggttgagg |
| | | | aagcggctaagacggctcctggaaagaagaggcctgtagagcagtctcct |
| | | | caggaaccggactcctccgcgggtattggcaaatcgggtgcacagcccgc |
| | | | taaaaagagactcaatttcggtcagactggcgacacagagtcagtcccag |
| | | | accctcaaccaatcggagaacctcccgcagccccctcaggtgtgggatct |
| | | | cttacaatggcttcaggtggtggcgcaccagtggcagacaataacgaagg |
| | | | tgccgatggagtgggtagttcctcgggaaattggcattgcgattcccaat |
| | | | ggctgggggacagagtcatcaccaccagcacccgaacctgggccctgccc |
| | | | acctacaacaatcacctctacaagcaaatctccaacagcacatctggagg |
| | | | atcttcaaatgacaacgcctacttcggctacagcaccccctgggggtatt |
| | | | ttgacttcaacagattccactgccacttctcaccacgtgactggcagcga |
| | | | ctcatcaacaacaactggggattccggcctaagcgactcaacttcaagct |
| | | | cttcaacattcaggtcaaagaggttacggacaacaatggagtcaagacca |
| | | | tcgccaataaccttaccagcacggtccaggtcttcacggactcagactat |
| | | | cagctcccgtacgtgctcgggtcggctcacgagggctgcctcccgccgtt |
| | | | cccagcggacgttttcatgattcctcagtacgggtatctgacgcttaatg |
| | | | atggaagccaggccgtgggtcgttcgtccttttactgcctggaatatttc |
| | | | ccgtcgcaaatgctaagaacgggtaacaacttccagttcagctacgagtt |
| | | | tgagaacgtacctttccatagcagctacgctcacagccaaagcctggacc |
| | | | gactaatgaatccactcatcgaccaatacttgtactatctctcTaGAact |
| | | | attAACGGTTCTGGACAGAATCAAcaaacgctaaaattcagtgtggccgg |
| | | | acccagcaacatggctgtccagggaagaaactacatacctggacccagct |
| | | | accgacaacaacgtgtctcaaccactgtgactcaaaacaacaacagcgaa |
| | | | tttgcttggcctggagcttcttcttgggctctcaatggacgtaatagctt |
| | | | gatgaatcctggacctgctatggccagccacaaagaaggagaggaccgtt |
| | | | tctttcctttgtctggatctttaatttttggcaaacaaggTacCggCaga |
| | | | gacaacgtggatgcggacaaagtcatgataaccaacgaagaagaaattaa |
| | | | aactactaacccggtagcaacggagtcctatggacaagtggccacaaacc |
| | | | accagagtGCCCAAGAATTGAACCCACGGGAGTTTGCACAAGCACAAacc |
| | | | ggttgggttcaaaaccaaggaatacttccgggtatggtttggcaggacag |
| | | | agatgtgtacctgcaaggacccatttgggccaaaattcctcacacggacg |
| | | | gcaactttcacccttctccgctgatgggagggtttggaatgaagcacccg |
| | | | cctcctcagatcctcatcaaaaacacacctgtacctgcggatcctccaac |
| | | | ggccttcaacaaggacaagctgaactctttcatcacccagtattctactg |
| | | | gccaagtcagcgtggagatcgagtgggagctgcagaaggaaaacagcaag |
| | | | cgctggaacccggagatccagtacacttccaactattacaagtctaataa |
| | | | tgttgaatttgctgttaatactgaaggtgtatatagtgaaccccgcccca |
| | | | ttggcaccagatacctgactcgtaatctg |
| 42 | DNA | Adeno- | atggctgccgatggttatcttccagattggctcgaggacaaccttagtga |
| | | Associated | aggaattcgcgagtggtgggctttgaaacctggagcccctcaacccaagg |
| | | Virus 9 | caaatcaacaacatcaagacaacgctcgaggtcttgtgcttccgggttac |
| | | comprising | aaataccttggacccggcaacggactcgacaagggggagccggtcaacgc |
| | | SEQ | agcagacgcggcggccctcgagcacgacaaggcctacgaccagcagctca |
| | | ID NO: 3 | aggccggagacaacccgtacctcaagtacaaccacgccgacgccgagttc |
| | | | caggagcggctcaaagaagatacgtcttttgggggcaacctcgggcgagc |
| | | | agtcttccaggccaaaaagaggcttcttgaacctcttggtctggttgagg |
| | | | aagcggctaagacggctcctggaaagaagaggcctgtagagcagtctcct |
| | | | caggaaccggactcctccgcgggtattggcaaatcgggtgcacagcccgc |
| | | | taaaaagagactcaatttcggtcagactggcgacacagagtcagtcccag |
| | | | accctcaaccaatcggagaacctcccgcagccccctcaggtgtgggatct |
| | | | cttacaatggcttcaggtggtggcgcaccagtggcagacaataacgaagg |
| | | | tgccgatggagtgggtagttcctcgggaaattggcattgcgattcccaat |
| | | | ggctgggggacagagtcatcaccaccagcacccgaacctgggccctgccc |
| | | | acctacaacaatcacctctacaagcaaatctccaacagcacatctggagg |
| | | | atcttcaaatgacaacgcctacttcggctacagcaccccctgggggtatt |
| | | | ttgacttcaacagattccactgccacttctcaccacgtgactggcagcga |
| | | | ctcatcaacaacaactggggattccggcctaagcgactcaacttcaagct |
| | | | cttcaacattcaggtcaaagaggttacggacaacaatggagtcaagacca |
| | | | tcgccaataaccttaccagcacggtccaggtcttcacggactcagactat |
| | | | cagctcccgtacgtgctcgggtcggctcacgagggctgcctcccgccgtt |
| | | | cccagcggacgttttcatgattcctcagtacgggtatctgacgcttaatg |
| | | | atggaagccaggccgtgggtcgttcgtccttttactgcctggaatatttc |
| | | | ccgtcgcaaatgctaagaacgggtaacaacttccagttcagctacgagtt |
| | | | tgagaacgtacctttccatagcagctagctcacagccaaagcctggaccg |
| | | | actaatgaatccactcatcgaccaatacttgtactatctctcTaGAacta |
| | | | ttAACGGTTCTGGACAGAATCAAcaaacgctaaaattcagtgtggccgga |
| | | | cccagcaacatggctgtccagggaagaaactacatacctggacccagcta |
| | | | ccgacaacaacgtgtctcaaccactgtgactcaaaacaacaacagcgaat |
| | | | ttgcttggcctggagcttcttcttgggctctcaatggacgtaatagcttg |
| | | | atgaatcctggacctgctatggccagccacaaagaaggagaggaccgttt |
| | | | ctttcctttgtctggatctttaatttttggcaaacaaggTacCggCagag |
| | | | acaacgtggatgcggacaaagtcatgataaccaacgaagaagaaattaaa |
| | | | actactaacccggtagcaacggagtcctatggacaagtggccacaaacca |
| | | | ccagagtGCGCAGGAGCTTAATCCTAGAGAATTCGCTCAGGCGCAGaccg |
| | | | gttgggttcaaaaccaaggaatacttccgggtatggtttggcaggacaga |
| | | | gatgtgtacctgcaaggacccatttgggccaaaattcctcacacggacgg |
| | | | caactttcacccttctccgctgatgggagggtttggaatgaagcacccgc |
| | | | ctcctcagatcctcatcaaaaacacacctgtacctgcggatcctccaacg |
| | | | gccttcaacaaggacaagctgaactctttcatcacccagtattctactgg |
| | | | ccaagtcagcgtggagatcgagtgggagctgcagaaggaaaacagcaagc |
| | | | gctggaacccggagatccagtacacttccaactattacaagtctaataat |
| | | | gttgaatttgctgttaatactgaaggtgtatatagtgaaccccgccccat |
| | | | tggcaccagatacctgactcgtaatctg |
| 43 | DNA | Adeno- | atggctgccgatggttatcttccagattggctcgaggacaaccttagtga |
| | | Associated | aggaattcgcgagtggtgggctttgaaacctggagcccctcaacccaagg |
| | | Virus 9 | caaatcaacaacatcaagacaacgctcgaggtcttgtgcttccgggttac |
| | | comprising | aaataccttggacccggcaacggactcgacaagggggagccggtcaacgc |
| | | SEQ | agcagacgcggcggccctcgagcacgacaaggcctacgaccagcagctca |
| | | ID NO: 3 | aggccggagacaacccgtacctcaagtacaaccacgccgacgccgagttc |
| | | | caggagcggctcaaagaagatacgtcttttgggggcaacctcgggcgagc |
| | | | agtcttccaggccaaaaagaggcttcttgaacctcttggtctggttgagg |
| | | | aagcggctaagacggctcctggaaagaagaggcctgtagagcagtctcct |
| | | | caggaaccggactcctccgcgggtattggcaaatcgggtgcacagcccgc |
| | | | taaaaagagactcaatttcggtcagactggcgacacagagtcagtcccag |
| | | | accctcaaccaatcggagaacctcccgcagccccctcaggtgtgggatct |
| | | | cttacaatggcttcaggtggtggcgcaccagtggcagacaataacgaagg |
| | | | tgccgatggagtgggtagttcctcgggaaattggcattgcgattcccaat |
| | | | ggctgggggacagagtcatcaccaccagcacccgaacctgggccctgccc |
| | | | acctacaacaatcacctctacaagcaaatctccaacagcacatctggagg |
| | | | atcttcaaatgacaacgcctacttcggctacagcaccccctgggggtatt |
| | | | ttgacttcaacagattccactgccacttctcaccacgtgactggcagcga |
| | | | ctcatcaacaacaactggggattccggcctaagcgactcaacttcaagct |
| | | | cttcaacattcaggtcaaagaggttacggacaacaatggagtcaagacca |
| | | | tcgccaataaccttaccagcacggtccaggtcttcacggactcagactat |
| | | | cagctcccgtacgtgctcgggtcggctcacgagggctgcctcccgccgtt |
| | | | cccagcggacgttttcatgattcctcagtacgggtatctgacgcttaatg |
| | | | atggaagccaggccgtgggtcgttcgtccttttactgcctggaatatttc |
| | | | ccgtcgcaaatgctaagaacgggtaacaacttccagttcagctacgagtt |
| | | | tgagaacgtacctttccatagcagctacgctcacagccaaagcctggacc |
| | | | gactaatgaatccactcatcgaccaatacttgtactatctctcTaGAact |
| | | | attAACGGTTCTGGACAGAATCAAcaaacgctaaaattcagtgtggccgg |
| | | | acccagcaacatggctgtccagggaagaaactacatacctggacccagct |
| | | | accgacaacaacgtgtctcaaccactgtgactcaaaacaacaacagcgaa |
| | | | tttgcttggcctggagcttcttcttgggctctcaatggacgtaatagctt |
| | | | gatgaatcctggacctgctatggccagccacaaagaaggagaggaccgtt |
| | | | tctttcctttgtctggatctttaatttttggcaaacaaggTacCggCaga |
| | | | gacaacgtggatgcggacaaagtcatgataaccaacgaagaagaaattaa |
| | | | aactactaacccggtagcaacggagtcctatggacaagtggccacaaacc |
| | | | accagagtGCACAAGAGCTTAATCCTCGAGAATTTGCTCAGGCGCAGacc |
| | | | ggttgggttcaaaaccaaggaatacttccgggtatggtttggcaggacag |
| | | | agatgtgtacctgcaaggacccatttgggccaaaattcctcacacggacg |
| | | | gcaactttcacccttctccgctgatgggagggtttggaatgaagcacccg |
| | | | cctcctcagatcctcatcaaaaacacacctgtacctgcggatcctccaac |
| | | | ggccttcaacaaggacaagctgaactctttcatcacccagtattctactg |
| | | | gccaagtcagcgtggagatcgagtgggagctgcagaaggaaaacagcaag |
| | | | cgctggaacccggagatccagtacacttccaactattacaagtctaataa |
| | | | tgttgaatttgctgttaatactgaaggtgtatatagtgaaccccgcccca |
| | | | ttggcaccagatacctgactcgtaatctg |
| 44 | DNA | Adeno- | atggctgccgatggttatcttccagattggctcgaggacaaccttagtga |
| | | Associated | aggaattcgcgagtggtgggctttgaaacctggagcccctcaacccaagg |
| | | Virus 9 | caaatcaacaacatcaagacaacgctcgaggtcttgtgcttccgggttac |
| | | comprising | aaataccttggacccggcaacggactcgacaagggggagccggtcaacgc |
| | | SEQ | agcagacgcggcggccctcgagcacgacaaggcctacgaccagcagctca |
| | | ID NO: 3 | aggccggagacaacccgtacctcaagtacaaccacgccgacgccgagttc |
| | | | caggagcggctcaaagaagatacgtcttttgggggcaacctcgggcgagc |
| | | | agtcttccaggccaaaaagaggcttcttgaacctcttggtctggttgagg |
| | | | aagcggctaagacggctcctggaaagaagaggcctgtagagcagtctcct |
| | | | caggaaccggactcctccgcgggtattggcaaatcgggtgcacagcccgc |
| | | | taaaaagagactcaatttcggtcagactggcgacacagagtcagtcccag |
| | | | accctcaaccaatcggagaacctcccgcagccccctcaggtgtgggatct |
| | | | cttacaatggcttcaggtggtggcgcaccagtggcagacaataacgaagg |
| | | | tgccgatggagtgggtagttcctcgggaaattggcattgcgattcccaat |
| | | | ggctgggggacagagtcatcaccaccagcacccgaacctgggccctgccc |
| | | | acctacaacaatcacctctacaagcaaatctccaacagcacatctggagg |
| | | | atcttcaaatgacaacgcctacttcggctacagcaccccctgggggtatt |
| | | | ttgacttcaacagattccactgccacttctcaccacgtgactggcagcga |
| | | | ctcatcaacaacaactggggattccggcctaagcgactcaacttcaagct |
| | | | cttcaacattcaggtcaaagaggttacggacaacaatggagtcaagacca |
| | | | tcgccaataaccttaccagcacggtccaggtcttcacggactcagactat |
| | | | cagctcccgtacgtgctcgggtcggctcacgagggctgcctcccgccgtt |
| | | | cccagcggacgttttcatgattcctcagtacgggtatctgacgcttaatg |
| | | | atggaagccaggccgtgggtcgttcgtccttttactgcctggaatatttc |
| | | | ccgtcgcaaatgctaagaacgggtaacaacttccagttcagctacgagtt |
| | | | tgagaacgtacctttccatagcagctacgctcacagccaaagcctggacc |
| | | | gactaatgaatccactcatcgaccaatacttgtactatctctcTaGAact |
| | | | attAACGGTTCTGGACAGAATCAAcaaacgctaaaattcagtgtggccgg |
| | | | acccagcaacatggctgtccagggaagaaactacatacctggacccagct |
| | | | accgacaacaacgtgtctcaaccactgtgactcaaaacaacaacagcgaa |
| | | | tttgcttggcctggagcttcttcttgggctctcaatggacgtaatagctt |
| | | | gatgaatcctggacctgctatggccagccacaaagaaggagaggaccgtt |
| | | | tctttcctttgtctggatctttaatttttggcaaacaaggTacCggCaga |
| | | | gacaacgtggatgcggacaaagtcatgataaccaacgaagaagaaattaa |
| | | | aactactaacccggtagcaacggagtcctatggacaagtggccacaaacc |
| | | | accagagtGCCCAGGAATTGAACCCAAGGGAGTTCGCTCAGGCTCAGacc |
| | | | ggttgggttcaaaaccaaggaatacttccgggtatggtttggcaggacag |
| | | | agatgtgtacctgcaaggacccatttgggccaaaattcctcacacggacg |
| | | | gcaactttcacccttctccgctgatgggagggtttggaatgaagcacccg |
| | | | cctcctcagatcctcatcaaaaacacacctgtacctgcggatcctccaac |
| | | | ggccttcaacaaggacaagctgaactctttcatcacccagtattctactg |
| | | | gccaagtcagcgtggagatcgagtgggagctgcagaaggaaaacagcaag |
| | | | cgctggaacccggagatccagtacacttccaactattacaagtctaataa |
| | | | tgttgaatttgctgttaatactgaaggtgtatatagtgaaccccgcccca |
| | | | ttggcaccagatacctgactcgtaatctg |
| 45 | DNA | Adeno- | atggctgccgatggttatcttccagattggctcgaggacaaccttagtga |
| | | Associated | aggaattcgcgagtggtgggctttgaaacctggagcccctcaacccaagg |
| | | Virus 9 | caaatcaacaacatcaagacaacgctcgaggtcttgtgcttccgggttac |
| | | comprising | aaataccttggacccggcaacggactcgacaagggggagccggtcaacgc |
| | | SEQ | agcagacgcggcggccctcgagcacgacaaggcctacgaccagcagctca |
| | | ID NO: 3 | aggccggagacaacccgtacctcaagtacaaccacgccgacgccgagttc |
| | | | caggagcggctcaaagaagatacgtcttttgggggcaacctcgggcgagc |
| | | | agtcttccaggccaaaaagaggcttcttgaacctcttggtctggttgagg |
| | | | aagcggctaagacggctcctggaaagaagaggcctgtagagcagtctcct |
| | | | caggaaccggactcctccgcgggtattggcaaatcgggtgcacagcccgc |
| | | | taaaaagagactcaatttcggtcagactggcgacacagagtcagtcccag |
| | | | accctcaaccaatcggagaacctcccgcagccccctcaggtgtgggatct |
| | | | cttacaatggcttcaggtggtggcgcaccagtggcagacaataacgaagg |
| | | | tgccgatggagtgggtagttcctcgggaaattggcattgcgattcccaat |
| | | | ggctgggggacagagtcatcaccaccagcacccgaacctgggccctgccc |
| | | | acctacaacaatcacctctacaagcaaatctccaacagcacatctggagg |
| | | | atcttcaaatgacaacgcctacttcggctacagcaccccctgggggtatt |
| | | | ttgacttcaacagattccactgccacttctcaccacgtgactggcagcga |
| | | | ctcatcaacaacaactggggattccggcctaagcgactcaacttcaagct |
| | | | cttcaacattcaggtcaaagaggttacggacaacaatggagtcaagacca |
| | | | tcgccaataaccttaccagcacggtccaggtcttcacggactcagactat |
| | | | cagctcccgtacgtgctcgggtcggctcacgagggctgcctcccgccgtt |
| | | | cccagcggacgttttcatgattcctcagtacgggtatctgacgcttaatg |
| | | | atggaagccaggccgtgggtcgttcgtccttttactgcctggaatatttc |
| | | | ccgtcgcaaatgctaagaacgggtaacaacttccagttcagctacgagtt |
| | | | tgagaacgtacctttccatagcagctacgctcacagccaaagcctggacc |
| | | | gactaatgaatccactcatcgaccaatacttgtactatctctcTaGAact |
| | | | attAACGGTTCTGGACAGAATCAAcaaacgctaaaattcagtgtggccgg |
| | | | acccagcaacatggctgtccagggaagaaactacatacctggacccagct |
| | | | accgacaacaacgtgtctcaaccactgtgactcaaaacaacaacagcgaa |
| | | | tttgcttggcctggagcttcttcttgggctctcaatggacgtaatagctt |
| | | | gatgaatcctggacctgctatggccagccacaaagaaggagaggaccgtt |
| | | | tctttcctttgtctggatctttaatttttggcaaacaaggTacCggCaga |
| | | | gacaacgtggatgcggacaaagtcatgataaccaacgaagaagaaattaa |
| | | | aactactaacccggtagcaacggagtcctatggacaagtggccacaaacc |
| | | | accagagtGCCCAGGAGTTAAACCCCCGAGAGTTCGCACAAGCCCAGacc |
| | | | ggttgggttcaaaaccaaggaatacttccgggtatggtttggcaggacag |
| | | | agatgtgtacctgcaaggacccatttgggccaaaattcctcacacggacg |
| | | | gcaactttcacccttctccgctgatgggagggtttggaatgaagcacccg |
| | | | cctcctcagatcctcatcaaaaacacacctgtacctgcggatcctccaac |
| | | | ggccttcaacaaggacaagctgaactctttcatcacccagtattctactg |
| | | | gccaagtcagcgtggagatcgagtgggagctgcagaaggaaaacagcaag |
| | | | cgctggaacccggagatccagtacacttccaactattacaagtctaataa |
| | | | tgttgaatttgctgttaatactgaaggtgtatatagtgaaccccgcccca |
| | | | ttggcaccagatacctgactcgtaatctg |
| 46 | DNA | Adeno- | atggctgccgatggttatcttccagattggctcgaggacaaccttagtga |
| | | Associated | aggaattcgcgagtggtgggctttgaaacctggagcccctcaacccaagg |
| | | Virus 9 | caaatcaacaacatcaagacaacgctcgaggtcttgtgcttccgggttac |
| | | comprising | aaataccttggacccggcaacggactcgacaagggggagccggtcaacgc |
| | | SEQ | agcagacgcggcggccctcgagcacgacaaggcctacgaccagcagctca |
| | | ID NO: 3 | aggccggagacaacccgtacctcaagtacaaccacgccgacgccgagttc |
| | | | caggagcggctcaaagaagatacgtcttttgggggcaacctcgggcgagc |
| | | | agtcttccaggccaaaaagaggcttcttgaacctcttggtctggttgagg |
| | | | aagcggctaagacggctcctggaaagaagaggcctgtagagcagtctcct |
| | | | caggaaccggactcctccgcgggtattggcaaatcgggtgcacagcccgc |
| | | | taaaaagagactcaatttcggtcagactggcgacacagagtcagtcccag |
| | | | accctcaaccaatcggagaacctcccgcagccccctaggtgtgggatctc |
| | | | ttacaatggcttcaggtggtggcgcaccagtggcagacaataacgaaggt |
| | | | gccgatggagtgggtagttcctcgggaaattggcattgcgattcccaatg |
| | | | gctgggggacagagtcatcaccaccagcacccgaacctgggccctgccca |
| | | | cctacaacaatcacctctacaagcaaatctccaacagcacatctggagga |
| | | | tcttcaaatgacaacgcctacttcggctacagcaccccctgggggtattt |
| | | | tgacttcaacagattccactgccacttctcaccacgtgactggcagcgac |
| | | | tcatcaacaacaactggggattccggcctaagcgactcaacttcaagctc |
| | | | ttcaacattcaggtcaaagaggttacggacaacaatggagtcaagaccat |
| | | | cgccaataaccttaccagcacggtccaggtcttcacggactcagactatc |
| | | | agctcccgtacgtgctcgggtcggctcacgagggctgcctcccgccgttc |
| | | | ccagcggacgttttcatgattcctcagtacgggtatctgacgcttaatga |
| | | | tggaagccaggccgtgggtcgttcgtccttttactgcctggaatatttcc |
| | | | cgtcgcaaatgctaagaacgggtaacaacttccagttcagctacgagttt |
| | | | gagaacgtacctttccatagcagctacgctcacagccaaagcctggaccg |
| | | | actaatgaatccactcatcgaccaatacttgtactatctctcTaGAacta |
| | | | ttAACGGTTCTGGACAGAATCAAcaaacgctaaaattcagtgtggccgga |
| | | | cccagcaacatggctgtccagggaagaaactacatacctggacccagcta |
| | | | ccgacaacaacgtgtctcaaccactgtgactcaaaacaacaacagcgaat |
| | | | ttgcttggcctggagcttcttcttgggctctcaatggacgtaatagcttg |
| | | | atgaatcctggacctgctatggccagccacaaagaaggagaggaccgttt |
| | | | ctttcctttgtctggatctttaatttttggcaaacaaggTacCggCagag |
| | | | acaacgtggatgcggacaaagtcatgataaccaacgaagaagaaattaaa |
| | | | actactaacccggtagcaacggagtcctatggacaagtggccacaaacca |
| | | | ccagagtGCACAAGAGTTAAACCCTCGCGAATTCGCCCAAGCTCAGaccg |
| | | | gttgggttcaaaaccaaggaatacttccgggtatggtttggcaggacaga |
| | | | gatgtgtacctgcaaggacccatttgggccaaaattcctcacacggacgg |
| | | | caactttcacccttctccgctgatgggagggtttggaatgaagcacccgc |
| | | | ctcctcagatcctcatcaaaaacacacctgtacctgggatcctccaacgg |
| | | | ccttcaacaaggacaagctgaactctttcatcacccagtattctactggc |
| | | | caagtcagcgtggagatcgagtgggagctgcagaaggaaaacagcaagcg |
| | | | ctggaacccggagatccagtacacttccaactattacaagtctaataatg |
| | | | ttgaatttgctgttaatactgaaggtgtatatagtgaaccccgccccatt |
| | | | ggcaccagatacctgactcgtaatctg |
| 47 | DNA | Adeno- | atggctgccgatggttatcttccagattggctcgaggacaaccttagtga |
| | | Associated | aggaattcgcgagtggtgggctttgaaacctggagcccctcaacccaagg |
| | | Virus 9 | caaatcaacaacatcaagacaacgctcgaggtcttgtgcttccgggttac |
| | | comprising | aaataccttggacccggcaacggactcgacaagggggagccggtcaacgc |
| | | SEQ | agcagacgcggcggccctcgagcacgacaaggcctacgaccagcagctca |
| | | ID NO: 3 | aggccggagacaacccgtacctcaagtacaaccacgccgacgccgagttc |
| | | | caggagcggctcaaagaagatacgtcttttgggggcaacctcgggcgagc |
| | | | agtcttccaggccaaaaagaggcttcttgaacctcttggtctggttgagg |
| | | | aagcggctaagacggctcctggaaagaagaggcctgtagagcagtctcct |
| | | | caggaaccggactcctccgcgggtattggcaaatcgggtgcacagcccgc |
| | | | taaaaagagactcaatttcggtcagactggcgacacagagtcagtcccag |
| | | | accctcaaccaatcggagaacctcccgcagccccctcaggtgtgggatct |
| | | | cttacaatggcttcaggtggtggcgcaccagtggcagacaataacgaagg |
| | | | tgccgatggagtgggtagttcctcgggaaattggcattgcgattcccaat |
| | | | ggctgggggacagagtcatcaccaccagcacccgaacctgggccctgccc |
| | | | acctacaacaatcacctctacaagcaaatctccaacagcacatctggagg |
| | | | atcttcaaatgacaacgcctacttcggctacagcaccccctgggggtatt |
| | | | ttgacttcaacagattccactgccacttctcaccacgtgactggcagcga |
| | | | ctcatcaacaacaactggggattccggcctaagcgactcaacttcaagct |
| | | | cttcaacattcaggtcaaagaggttacggacaacaatggagtcaagacca |
| | | | tcgccaataaccttaccagcacggtccaggtcttcacggactcagactat |
| | | | cagctcccgtacgtgctcgggtcggctcacgagggctgcctcccgccgtt |
| | | | cccagcggacgttttcatgattcctcagtacgggtatctgacgcttaatg |
| | | | atggaagccaggccgtgggtcgttcgtccttttactgcctggaatatttc |
| | | | ccgtcgcaaatgctaagaacgggtaacaacttccagttcagctacgagtt |
| | | | tgagaacgtacctttccatagcagctacgctcacagccaaagcctggacc |
| | | | gactaatgaatccactcatcgaccaatacttgtactatctctcTaGAact |
| | | | attAACGGTTCTGGACAGAATCAAcaaacgctaaaattcagtgtggccgg |
| | | | acccagcaacatggctgtccagggaagaaactacatacctggacccagct |
| | | | accgacaacaacgtgtctcaaccactgtgactcaaaacaacaacagcgaa |
| | | | tttgcttggcctggagcttcttcttgggctctcaatggacgtaatagctt |
| | | | gatgaatcctggacctgctatggccagccacaaagaaggagaggaccgtt |
| | | | tctttcctttgtctggatctttaatttttggcaaacaaggTacCggCaga |
| | | | gacaacgtggatgcggacaaagtcatgataaccaacgaagaagaaattaa |
| | | | aactactaacccggtagcaacggagtcctatggacaagtggccacaaacc |
| | | | accagagtGCGCAGGAATTGAACCCAAGAGAGTTCGCCCAAGCACAAacc |
| | | | ggttgggttcaaaaccaaggaatacttccgggtatggtttggcaggacag |
| | | | agatgtgtacctgcaaggacccatttgggccaaaattcctcacacggacg |
| | | | gcaactttcacccttctccgctgatgggagggtttggaatgaagcacccg |
| | | | cctcctcagatcctcatcaaaaacacacctgtacctgcggatcctccaac |
| | | | ggccttcaacaaggacaagctgaactctttcatcacccagtattctactg |
| | | | gccaagtcagcgtggagatcgagtgggagctgcagaaggaaaacagcaag |
| | | | cgctggaacccggagatccagtacacttccaactattacaagtctaataa |
| | | | tgttgaatttgctgttaatactgaaggtgtatatagtgaaccccgcccca |
| | | | ttggcaccagatacctgactcgtaatctg |
| 48 | DNA | Adeno- | atggctgccgatggttatcttccagattggctcgaggacaaccttagtga |
| | | Associated | aggaattcgcgagtggtgggctttgaaacctggagcccctcaacccaagg |
| | | Virus 9 | caaatcaacaacatcaagacaacgctcgaggtcttgtgcttccgggttac |
| | | comprising | aaataccttggacccggcaacggactcgacaagggggagccggtcaacgc |
| | | SEQ | agcagacgcggcggccctcgagcacgacaaggcctacgaccagcagctca |
| | | ID NO: 3 | aggccggagacaacccgtacctcaagtacaaccacgccgacgccgagttc |
| | | | caggagcggctcaaagaagatacgtcttttgggggcaacctcgggcgagc |
| | | | agtcttccaggccaaaaagaggcttcttgaacctcttggtctggttgagg |
| | | | aagcggctaagacggctcctggaaagaagaggcctgtagagcagtctcct |
| | | | caggaaccggactcctccgcgggtattggcaaatcgggtgcacagcccgc |
| | | | taaaaagagactcaatttcggtcagactggcgacacagagtcagtcccag |
| | | | accctcaaccaatcggagaacctcccgcagccccctcaggtgtgggatct |
| | | | cttacaatggcttcaggtggtggcgcaccagtggcagacaataacgaagg |
| | | | tgccgatggagtgggtagttcctcgggaaattggcattgcgattcccaat |
| | | | ggctgggggacagagtcatcaccaccagcacccgaacctgggccctgccc |
| | | | acctacaacaatcacctctacaagcaaatctccaacagcacatctggagg |
| | | | atcttcaaatgacaacgcctacttcggctacagcaccccctgggggtatt |
| | | | ttgacttcaacagattccactgccacttctcaccacgtgactggcagcga |
| | | | ctcatcaacaacaactggggattccggcctaagcgactcaacttcaagct |
| | | | cttcaacattcaggtcaaagaggttacggacaacaatggagtcaagacca |
| | | | tcgccaataaccttaccagcacggtccaggtcttcacggactcagactat |
| | | | cagctcccgtacgtgctcgggtcggctcacgagggctgcctcccgccgtt |
| | | | cccagcggacgttttcatgattcctcagtacgggtatctgacgcttaatg |
| | | | atggaagccaggccgtgggtcgttcgtccttttactgcctggaatatttc |
| | | | ccgtcgcaaatgctaagaacgggtaacaacttccagttcagctacgagtt |
| | | | tgagaacgtacctttccatagcagctacgctcacagccaaagcctggacc |
| | | | gactaatgaatccactcatcgaccaatacttgtactatctctcTaGAact |
| | | | attAACGGTTCTGGACAGAATCAAcaaacgctaaaattcagtgtggccgg |
| | | | acccagcaacatggctgtccagggaagaaactacatacctggacccagct |
| | | | accgacaacaacgtgtctcaaccactgtgactcaaaacaacaacagcgaa |
| | | | tttgcttggcctggagcttcttcttgggctctcaatggacgtaatagctt |
| | | | gatgaatcctggacctgctatggccagccacaaagaaggagaggaccgtt |
| | | | tctttcctttgtctggatctttaatttttggcaaacaaggTacCggCaga |
| | | | gacaacgtggatgcggacaaagtcatgataaccaacgaagaagaaattaa |
| | | | aactactaacccggtagcaacggagtcctatggacaagtggccacaaacc |
| | | | accagagtGCACAAGAGCTAAATCCCCGCGAATTTGCACAAGCCCAAacc |
| | | | ggttgggttcaaaaccaaggaatacttccgggtatggtttggcaggacag |
| | | | agatgtgtacctgcaaggacccatttgggccaaaattcctcacacggacg |
| | | | gcaactttcacccttctccgctgatgggagggtttggaatgaagcacccg |
| | | | cctcctcagatcctcatcaaaaacacacctgtacctgcggatcctccaac |
| | | | ggccttcaacaaggacaagctgaactctttcatcacccagtattctactg |
| | | | gccaagtcagcgtggagatcgagtgggagctgcagaaggaaaacagcaag |
| | | | cgctggaacccggagatccagtacacttccaactattacaagtctaataa |
| | | | tgttgaatttgctgttaatactgaaggtgtatatagtgaaccccgcccca |
| | | | ttggcaccagatacctgactcgtaatctg |
| 49 | DNA | Adeno- | atggctgccgatggttatcttccagattggctcgaggacaaccttagtga |
| | | Associated | aggaattcgcgagtggtgggctttgaaacctggagcccctcaacccaagg |
| | | Virus 9 | caaatcaacaacatcaagacaacgctcgaggtcttgtgcttccgggttac |
| | | comprising | aaataccttggacccggcaacggactcgacaagggggagccggtcaacgc |
| | | SEQ | agcagacgcggcggccctcgagcacgacaaggcctacgaccagcagctca |
| | | ID NO: 3 | aggccggagacaacccgtacctcaagtacaaccacgccgacgccgagttc |
| | | | caggagcggctcaaagaagatacgtcttttgggggcaacctcgggcgagc |
| | | | agtcttccaggccaaaaagaggcttcttgaacctcttggtctggttgagg |
| | | | aagcggctaagacggctcctggaaagaagaggcctgtagagcagtctcct |
| | | | caggaaccggactcctccgcgggtattggcaaatcgggtgcacagcccgc |
| | | | taaaaagagactcaatttcggtcagactggcgacacagagtcagtcccag |
| | | | accctcaaccaatcggagaacctcccgcagccccctcaggtgtgggatct |
| | | | cttacaatggcttcaggtggtggcgcaccagtggcagacaataacgaagg |
| | | | tgccgatggagtgggtagttcctcgggaaattggcattgcgattcccaat |
| | | | ggctgggggacagagtcatcaccaccagcacccgaacctgggccctgccc |
| | | | acctacaacaatcacctctacaagcaaatctccaacagcacatctggagg |
| | | | atcttcaaatgacaacgcctacttcggctacagcaccccctgggggtatt |
| | | | ttgacttcaacagattccactgccacttctcaccacgtgactggcagcga |
| | | | ctcatcaacaacaactggggattccggcctaagcgactcaacttcaagct |
| | | | cttcaacattcaggtcaaagaggttacggacaacaatggagtcaagacca |
| | | | tcgccaataaccttaccagcacggtccaggtcttcacggactcagactat |
| | | | cagctcccgtacgtgctcgggtcggctcacgagggctgcctcccgccgtt |
| | | | cccagcggacgttttcatgattcctcagtacgggtatctgacgcttaatg |
| | | | atggaagccaggccgtgggtcgttcgtccttttactgcctggaatatttc |
| | | | ccgtcgcaaatgctaagaacgggtaacaacttccagttcagctacgagtt |
| | | | tgagaacgtacctttccatagcagctacgctcacagccaaagcctggacc |
| | | | gactaatgaatccactcatcgaccaatacttgtactatctctcTaGAact |
| | | | attAACGGTTCTGGACAGAATCAAcaaacgctaaaattcagtgtggccgg |
| | | | acccagcaacatggctgtccagggaagaaactacatacctggacccagct |
| | | | accgacaacaacgtgtctcaaccactgtgactcaaaacaacaacagcgaa |
| | | | tttgcttggcctggagcttcttcttgggctctcaatggacgtaatagctt |
| | | | gatgaatcctggacctgctatggccagccacaaagaaggagaggaccgtt |
| | | | tctttcctttgtctggatctttaatttttggcaaacaaggTacCggCaga |
| | | | gacaacgtggatgcggacaaagtcatgataaccaacgaagaagaaattaa |
| | | | aactactaacccggtagcaacggagtcctatggacaagtggccacaaacc |
| | | | accagagtGCGCAAGAACTGAATCCTAGGGAATTTGCGCAGGCACAAacc |
| | | | ggttgggttcaaaaccaaggaatacttccgggtatggtttggcaggacag |
| | | | agatgtgtacctgcaaggacccatttgggccaaaattcctcacacggacg |
| | | | gcaactttcacccttctccgctgatgggagggtttggaatgaagcacccg |
| | | | cctcctcagatcctcatcaaaaacacacctgtacctgcggatcctccaac |
| | | | ggccttcaacaaggacaagctgaactctttcatcacccagtattctactg |
| | | | gccaagtcagcgtggagatcgagtgggagctgcagaaggaaaacagcaag |
| | | | cgctggaacccggagatccagtacacttccaactattacaagtctaataa |
| | | | tgttgaatttgctgttaatactgaaggtgtatatagtgaaccccgcccca |
| | | | ttggcaccagatacctgactcgtaatctg |
| 50 | DNA | Adeno- | atggctgccgatggttatcttccagattggctcgaggacaaccttagtga |
| | | Associated | aggaattcgcgagtggtgggctttgaaacctggagcccctcaacccaagg |
| | | Virus 9 | caaatcaacaacatcaagacaacgctcgaggtcttgtgcttccgggttac |
| | | comprising | aaataccttggacccggcaacggactcgacaagggggagccggtcaacgc |
| | | SEQ | agcagacgcggcggccctcgagcacgacaaggcctacgaccagcagctca |
| | | ID NO: 3 | aggccggagacaacccgtacctcaagtacaaccacgccgacgccgagttc |
| | | | caggagcggctcaaagaagatacgtcttttgggggcaacctcgggcgagc |
| | | | agtcttccaggccaaaaagaggcttcttgaacctcttggtctggttgagg |
| | | | aagcggctaagacggctcctggaaagaagaggcctgtagagcagtctcct |
| | | | caggaaccggactcctccgcgggtattggcaaatcgggtgcacagcccgc |
| | | | taaaaagagactcaatttcggtcagactggcgacacagagtcagtcccag |
| | | | accctcaaccaatcggagaacctcccgcagccccctcaggtgtgggatct |
| | | | cttacaatggcttcaggtggtggcgcaccagtggcagacaataacgaagg |
| | | | tgccgatggagtgggtagttcctcgggaaattggcattgcgattcccaat |
| | | | ggctgggggacagagtcatcaccaccagcacccgaacctgggccctgccc |
| | | | acctacaacaatcacctctacaagcaaatctccaacagcacatctggagg |
| | | | atcttcaaatgacaacgcctacttcggctacagcaccccctgggggtatt |
| | | | ttgacttcaacagattccactgccacttctcaccacgtgactggcagcga |
| | | | ctcatcaacaacaactggggattccggcctaagcgactcaacttcaagct |
| | | | cttcaacattcaggtcaaagaggttacggacaacaatggagtcaagacca |
| | | | tcgccaataaccttaccagcacggtccaggtcttcacggactcagactat |
| | | | cagctcccgtacgtgctcgggtcggctcacgagggctgcctcccgccgtt |
| | | | cccagcggacgttttcatgattcctcagtacgggtatctgacgcttaatg |
| | | | atggaagccaggccgtgggtcgttcgtccttttactgcctggaatatttc |
| | | | ccgtcgcaaatgctaagaacgggtaacaacttccagttcagctacgagtt |
| | | | tgagaacgtacctttccatagcagctacgctcacagccaaagcctggacc |
| | | | gactaatgaatccactcatcgaccaatacttgtactatctctcTaGAact |
| | | | attAACGGTTCTGGACAGAATCAAcaaacgctaaaattcagtgtggccgg |
| | | | acccagcaacatggctgtccagggaagaaactacatacctggacccagct |
| | | | accgacaacaacgtgtctcaaccactgtgactcaaaacaacaacagcgaa |
| | | | tttgcttggcctggagcttcttcttgggctctcaatggacgtaatagctt |
| | | | gatgaatcctggacctgctatggccagccacaaagaaggagaggaccgtt |
| | | | tctttcctttgtctggatctttaatttttggcaaacaaggTacCggCaga |
| | | | gacaacgtggatgcggacaaagtcatgataaccaacgaagaagaaattaa |
| | | | aactactaacccggtagcaacggagtcctatggacaagtggccacaaacc |
| | | | accagagtGCTCAGGAACTCAATCCACGAGAGTTTGCGCAGGCGCAAacc |
| | | | ggttgggttcaaaaccaaggaatacttccgggtatggtttggcaggacag |
| | | | agatgtgtacctgcaaggacccatttgggccaaaattcctcacacggacg |
| | | | gcaactttcacccttctccgctgatgggagggtttggaatgaagcacccg |
| | | | cctcctcagatcctcatcaaaaacacacctgtacctgcggatcctccaac |
| | | | ggccttcaacaaggacaagctgaactctttcatcacccagtattctactg |
| | | | gccaagtcagcgtggagatcgagtgggagctgcagaaggaaaacagcaag |
| | | | cgctggaacccggagatccagtacacttccaactattacaagtctaataa |
| | | | tgttgaatttgctgttaatactgaaggtgtatatagtgaaccccgcccca |
| | | | ttggcaccagatacctgactcgtaatctg |
| 51 | DNA | Adeno- | atggctgccgatggttatcttccagattggctcgaggacaaccttagtga |
| | | Associated | aggaattcgcgagtggtgggctttgaaacctggagcccctcaacccaagg |
| | | Virus 9 | caaatcaacaacatcaagacaacgctcgaggtcttgtgcttccgggttac |
| | | comprising | aaataccttggacccggcaacggactcgacaagggggagccggtcaacgc |
| | | SEQ | agcagacgcggcggccctcgagcacgacaaggcctacgaccagcagctca |
| | | ID NO: 4 | aggccggagacaacccgtacctcaagtacaaccacgccgacgccgagttc |
| | | | caggagcggctcaaagaagatacgtcttttgggggcaacctcgggcgagc |
| | | | agtcttccaggccaaaaagaggcttcttgaacctcttggtctggttgagg |
| | | | aagcggctaagacggctcctggaaagaagaggcctgtagagcagtctcct |
| | | | caggaaccggactcctccgcgggtattggcaaatcgggtgcacagcccgc |
| | | | taaaaagagactcaatttcggtcagactggcgacacagagtcagtcccag |
| | | | accctcaaccaatcggagaacctcccgcagccccctcaggtgtgggatct |
| | | | cttacaatggcttcaggtggtggcgcaccagtggcagacaataacgaagg |
| | | | tgccgatggagtgggtagttcctcgggaaattggcattgcgattcccaat |
| | | | ggctgggggacagagtcatcaccaccagcacccgaacctgggccctgccc |
| | | | acctacaacaatcacctctacaagcaaatctccaacagcacatctggagg |
| | | | atcttcaaatgacaacgcctacttcggctacagcaccccctgggggtatt |
| | | | ttgacttcaacagattccactgccacttctcaccacgtgactggcagcga |
| | | | ctcatcaacaacaactggggattccggcctaagcgactcaacttcaagct |
| | | | cttcaacattcaggtcaaagaggttacggacaacaatggagtcaagacca |
| | | | tcgccaataaccttaccagcacggtccaggtcttcacggactcagactat |
| | | | cagctcccgtacgtgctcgggtcggctcacgagggctgcctcccgccgtt |
| | | | cccagcggacgttttcatgattcctcagtacgggtatctgacgcttaatg |
| | | | atggaagccaggccgtgggtcgttcgtccttttactgcctggaatatttc |
| | | | ccgtcgcaaatgctaagaacgggtaacaacttccagttcagctacgagtt |
| | | | tgagaacgtacctttccatagcagctacgctcacagccaaagcctggacc |
| | | | gactaatgaatccactcatcgaccaatacttgtactatctctcTaGAact |
| | | | attAACGGTTCTGGACAGAATCAAcaaacgctaaaattcagtgtggccgg |
| | | | acccagcaacatggctgtccagggaagaaactacatacctggacccagct |
| | | | accgacaacaacgtgtctcaaccactgtgactcaaaacaacaacagcgaa |
| | | | tttgcttggcctggagcttcttcttgggctctcaatggacgtaatagctt |
| | | | gatgaatcctggacctgctatggccagccacaaagaaggagaggaccgtt |
| | | | tctttcctttgtctggatctttaatttttggcaaacaaggTacCggCaga |
| | | | gacaacgtggatgcggacaaagtcatgataaccaacgaagaagaaattaa |
| | | | aactactaacccggtagcaacggagtcctatggacaagtggccacaaacc |
| | | | accagagtGCTCAAGGTAAGCTACCCAGGGAGTTCGCACAAGCGCAGacc |
| | | | ggttgggttcaaaaccaaggaatacttccgggtatggtttggcaggacag |
| | | | agatgtgtacctgcaaggacccatttgggccaaaattcctcacacggacg |
| | | | gcaactttcacccttctccgctgatgggagggtttggaatgaagcacccg |
| | | | cctcctcagatcctcatcaaaaacacacctgtacctgcggatcctccaac |
| | | | ggccttcaacaaggacaagctgaactctttcatcacccagtattctactg |
| | | | gccaagtcagcgtggagatcgagtgggagctgcagaaggaaaacagcaag |
| | | | cgctggaacccggagatccagtacacttccaactattacaagtctaataa |
| | | | tgttgaatttgctgttaatactgaaggtgtatatagtgaaccccgcccca |
| | | | ttggcaccagatacctgactcgtaatctgatggctgccgatggttatctt |
| | | | ccagattggctcgaggacaaccttagtgaaggaattcgcgagtggtgggc |
| | | | tttgaaacctg |
| 52 | DNA | Adeno- | gagcccctcaacccaaggcaaatcaacaacatcaagacaacgctcgaggt |
| | | Associated | cttgtgcttccgggttacaaataccttggacccggcaacggactcgacaa |
| | | Virus 9 | gggggagccggtcaacgcagcagacgcggcggccctcgagcacgacaagg |
| | | comprising | cctacgaccagcagctcaaggrcggagacaacccgtacctcaagtacaac |
| | | SEQ | cacgccgacgccgagttccaggagcggctcaaagaagatacgtcttttgg |
| | | ID NO: 4 | gggcaacctcgggcgagcagtcttccaggccaaaaagaggcttcttgaac |
| | | | ctcttggtctggttgaggaagcggctaagacggctcctggaaagaagagg |
| | | | cctgtagagcagtctcctcaggaaccggactcctccgcgggtattggcaa |
| | | | atcgggtgcacagcccgctaaaaagagactcaatttcggtcagactggcg |
| | | | acacagagtcagtcccagaccctcaaccaatcggagaacctcccgcagcc |
| | | | ccctcaggtgtgggatctcttacaatggcttcaggtggtggcgcaccagt |
| | | | ggcagacaataacgaaggtgccgatggagtgggtagttcctcgggaaatt |
| | | | ggcattgcgattcccaatggctgggggacagagtcatcaccaccagcacc |
| | | | cgaacctgggccctgcccacctacaacaatcacctctacaagcaaatctc |
| | | | caacagcacatctggaggatcttcaaatgacaacgcctacttcggctaca |
| | | | gcaccccctgggggtattttgacttcaacagattccactgccacttctca |
| | | | ccacgtgactggcagcgactcatcaacaacaactggggattccggcctaa |
| | | | gcgactcaacttcaagctcttcaacattcaggtcaaagaggttacggaca |
| | | | acaatggagtcaagaccatcgccaataaccttaccagcacggtccaggtc |
| | | | ttcacggactcagactatcagctcccgtacgtgctcgggtcggctcacga |
| | | | gggctgcctcccgccgttcccagcggacgttttcatgattcctcagtacg |
| | | | ggtatctgacgcttaatgatggaagccaggccgtgggtcgttcgtccttt |
| | | | tactgcctggaatatttcccgtcgcaaatgctaagaacgggtaacaactt |
| | | | ccagttcagctacgagtttgagaacgtacctttccatagcagctacgctc |
| | | | acagccaaagcctggaccgactaatgaatccactcatcgaccaatacttg |
| | | | tactatctctcTaGAactattAACGGTTCTGGACAGAATCAAcaaacgct |
| | | | aaaattcagtgtggccggacccagcaacatggctgtccagggaagaaact |
| | | | acatacctggacccagctaccgacaacaacgtgtctcaaccactgtgact |
| | | | caaaacaacaacagcgaatttgcttggcctggagcttcttcttgggctct |
| | | | caatggacgtaatagcttgatgaatcctggacctgctatggccagccaca |
| | | | aagaaggagaggaccgtttctttcctttgtctggatctttaatttttggc |
| | | | aaacaaggTacCggCagagacaacgtggatgcggacaaagtcatgataac |
| | | | caacgaagaagaaattaaaactactaacccggtagcaacggagtcctatg |
| | | | gacaagtggccacaaaccaccagagtGCACAGGGGAAACTTCCCAGGGAA |
| | | | TTCGCCCAGGCCCAAaccggttgggttcaaaaccaaggaatacttccggg |
| | | | tatggtttggcaggacagagatgtgtacctgcaaggacccatttgggcca |
| | | | aaattcctcacacggacggcaactttcacccttctccgctgatgggaggg |
| | | | tttggaatgaagcacccgcctcctcagatcctcatcaaaaacacacctgt |
| | | | acctgcggatcctccaacggccttcaacaaggacaagctgaactctttca |
| | | | tcacccagtattctactggccaagtcagcgtggagatcgagtgggagctg |
| | | | cagaaggaaaacagcaagcgctggaacccggagatccagtacacttccaa |
| | | | ctattacaagtctaataatgttgaatttgctgttaatactgaaggtgtat |
| | | | atagtgaaccccgccccattggcaccagatacctgactcgtaatctg |
| 53 | DNA | Adeno- | atggctgccgatggttatcttccagattggctcgaggacaaccttagtga |
| | | Associated | aggaattcgcgagtgggggctttgaaacctggagcccctcaacccaaggc |
| | | Virus 9 | aaatcaacaacatcaagacaacgctcgaggtcttgtgcttccgggttaca |
| | | comprising | aataccttggacccggcaacggactcgacaagggggagccggtcaacgca |
| | | SEQ | gcagacgcggcggccctcgagcacgacaaggcctacgaccagcagctcaa |
| | | ID NO: 4 | ggccggagacaacccgtacctcaagtacaaccacgccgacgccgagttcc |
| | | | aggagcggctcaaagaagatacgtcttttgggggcaacctcgggcgagca |
| | | | gtcttccaggccaaaaagaggcttcttgaacctcttggtctggttgagga |
| | | | agcggctaagacggctcctggaaagaagaggcctgtagagcagtctcctc |
| | | | aggaaccggactcctccgcgggtattggcaaatcgggtgcacagcccgct |
| | | | aaaaagagactcaatttcggtcagactggcgacacagagtcagtcccaga |
| | | | ccctcaaccaatcggagaacctcccgcagccccctcaggtgtgggatctc |
| | | | ttacaatggcttcaggtggtggcgcaccagtggcagacaataacgaaggt |
| | | | gccgatggagtgggtagttcctcgggaaattggcattgcgattcccaatg |
| | | | gctgggggacagagtcatcaccaccagcacccgaacctgggccctgccca |
| | | | cctacaacaatcacctctacaagcaaatctccaacagcacatctggagga |
| | | | tcttcaaatgacaacgcctacttcggctacagcaccccctgggggtattt |
| | | | tgacttcaacagattccactgccacttctcaccacgtgactggcagcgac |
| | | | tcatcaacaacaactggggattccggcctaagcgactcaacttcaagctc |
| | | | ttcaacattcaggtcaaagaggttacggacaacaatggagtcaagaccat |
| | | | cgccaataaccttaccagcacggtccaggtcttcacggactcagactatc |
| | | | agctcccgtacgtgctcgggtcggctcacgagggctgcctcccgccgttc |
| | | | ccagcggacgttttcatgattcctcagtacgggtatctgacgcttaatga |
| | | | tggaagccaggccgtgggtcgttcgtccttttactgcctggaatatttcc |
| | | | cgtcgcaaatgctaagaacgggtaacaacttccagttcagctacgagttt |
| | | | gagaacgtacctttccatagcagctacgctcacagccaaagcctggaccg |
| | | | actaatgaatccactcatcgaccaatacttgtactatctctcTaGAacta |
| | | | ttAACGGTTCTGGACAGAATCAAcaaacgctaaaattcagtgtggccgga |
| | | | cccagcaacatggctgtccagggaagaaactacatacctggacccagcta |
| | | | ccgacaacaacgtgtctcaaccactgtgactcaaaacaacaacagcgaat |
| | | | ttgcttggcctggagcttcttcttgggctctcaatggacgtaatagcttg |
| | | | atgaatcctggacctgctatggccagccacaaagaaggagaggaccgttt |
| | | | ctttcctttgtctggatctttaatttttggcaaacaaggTacCggCagag |
| | | | acaacgtggatgcggacaaagtcatgataaccaacgaagaagaaattaaa |
| | | | actactaacccggtagcaacggagtcctatggacaagtggccacaaacca |
| | | | ccagagtGCGCAAGGTAAGCTGCCTCGCGAGTTTGCACAAGCACAGaccg |
| | | | gttgggttcaaaaccaaggaatacttccgggtatggtttggcaggacaga |
| | | | gatgtgtacctgcaaggacccatttgggccaaaattcctcacacggacgg |
| | | | caactttcacccttctccgctgatgggagggtttggaatgaagcacccgc |
| | | | ctcctcagatcctcatcaaaaacacacctgtacctgcggatcctccaacg |
| | | | gccttcaacaaggacaagctgaactctttcatcacccagtattctactgg |
| | | | ccaagtcagcgtggagatcgagtgggagctgcagaaggaaaacagcaagc |
| | | | gctggaacccggagatccagtacacttccaactattacaagtctaataat |
| | | | gttgaatttgctgttaatactgaaggtgtatatagtgaaccccgccccat |
| | | | tggcaccagatacctgactcgtaatctg |
| 54 | DNA | Adeno- | atggctgccgatggttatcttccagattggctcgaggacaaccttagtga |
| | | Associated | aggaattcgcgagtggtgggctttgaaacctggagcccctcaacccaagg |
| | | Virus 9 | caaatcaacaacatcaagacaacgctcgaggtcttgtgcttccgggttac |
| | | comprising | aaataccttggacccggcaacggactcgacaagggggagccggtcaacgc |
| | | SEQ | agcagacgcggcggccctcgagcacgacaaggcctacgaccagcagctca |
| | | ID NO: 4 | aggccggagacaacccgtacctcaagtacaaccacgccgacgccgagttc |
| | | | caggagcggctcaaagaagatacgtcttttgggggcaacctcgggcgagc |
| | | | agtcttccaggccaaaaagaggcttcttgaacctcttggtctggttgagg |
| | | | aagcggctaagacggctcctggaaagaagaggcctgtagagcagtctcct |
| | | | caggaaccggactcctccgcgggtattggcaaatcgggtgcacagcccgc |
| | | | taaaaagagactcaatttcggtcagactggcgacacagagtcagtcccag |
| | | | accctcaaccaatcggagaacctcccgcagccccctcaggtgtgggatct |
| | | | cttacaatggcttcaggtggtggcgcaccagtggcagacaataacgaagg |
| | | | tgccgatggagtgggtagttcctcgggaaattggcattgcgattcccaat |
| | | | ggctgggggacagagtcatcaccaccagcacccgaacctgggccctgccc |
| | | | acctacaacaatcacctctacaagcaaatctccaacagcacatctggagg |
| | | | atcttcaaatgacaacgcctacttcggctacagcaccccctgggggtatt |
| | | | ttgacttcaacagattccactgccacttctcaccacgtgactggcagcga |
| | | | ctcatcaacaacaactggggattccggcctaagcgactcaacttcaagct |
| | | | cttcaacattcaggtcaaagaggttacggacaacaatggagtcaagacca |
| | | | tcgccaataaccttaccagcacggtccaggtcttcacggactcagactat |
| | | | cagctcccgtacgtgctcgggtcggctcacgagggctgcctcccgccgtt |
| | | | cccagcggacgttttcatgattcctcagtacgggtatctgacgcttaatg |
| | | | atggaagccaggccgtgggtcgttcgtccttttactgcctggaatatttc |
| | | | ccgtcgcaaatgctaagaacgggtaacaacttccagttcagctacgagtt |
| | | | tgagaacgtacctttccatagcagctacgctcacagccaaagcctggacc |
| | | | gactaatgaatccactcatcgaccaatacttgtactatctctcTaGAact |
| | | | attAACGGTTCTGGACAGAATCAAcaaacgctaaaattcagtgtggccgg |
| | | | acccagcaacatggctgtccagggaagaaactacatacctggacccagct |
| | | | accgacaacaacgtgtctcaaccactgtgactcaaaacaacaacagcgaa |
| | | | tttgcttggcctggagcttcttcttgggctctcaatggacgtaatagctt |
| | | | gatgaatcctggacctgctatggccagccacaaagaaggagaggaccgtt |
| | | | tctttcctttgtctggatctttaatttttggcaaacaaggTacCggCaga |
| | | | gacaacgtggatgcggacaaagtcatgataaccaacgaagaagaaattaa |
| | | | aactactaacccggtagcaacggagtcctatggacaagtggccacaaacc |
| | | | accagagtGCGCAAGGTAAACTCCCTAGAGAGTTCGCTCAAGCACAGacc |
| | | | ggttgggttcaaaaccaaggaatacttccgggtatggtttggcaggacag |
| | | | agatgtgtacctgcaaggacccatttgggccaaaattcctcacacggacg |
| | | | gcaactttcacccttctccgctgatgggagggtttggaatgaagcacccg |
| | | | cctcctcagatcctcatcaaaaacacacctgtacctgcggatcctccaac |
| | | | ggccttcaacaaggacaagctgaactctttcatcacccagtattctactg |
| | | | gccaagtcagcgtggagatcgagtgggagctgcagaaggaaaacagcaag |
| | | | cgctggaacccggagatccagtacacttccaactattacaagtctaataa |
| | | | tgttgaatttgctgttaatactgaaggtgtatatagtgaaccccgcccca |
| | | | ttggcaccagatacctgactcgtaatctg |
| 55 | DNA | Adeno- | atggctgccgatggttatcttccagattggctcgaggacaaccttagtga |
| | | Associated | aggaattcgcgagtggtgggctttgaaacctggagcccctcaacccaagg |
| | | Virus 9 | caaatcaacaacatcaagacaacgctcgaggtcttgtgcttccgggttac |
| | | comprising | aaataccttggacccggcaacggactcgacaagggggagccggtcaacgc |
| | | SEQ | agcagacgcggcggccctcgagcacgacaaggcctacgaccagcagctca |
| | | ID NO: 4 | aggccggagacaacccgtacctcaagtacaaccacgccgacgccgagttc |
| | | | caggagcggctcaaagaagatacgtcttttgggggcaacctcgggcgagc |
| | | | agtcttccaggccaaaaagaggcttcttgaacctcttggtctggttgagg |
| | | | aagcggctaagacggctcctggaaagaagaggcctgtagagcagtctcct |
| | | | caggaaccggactcctccgcgggtattggcaaatcgggtgcacagcccgc |
| | | | taaaaagagactcaatttcggtcagactggcgacacagagtcagtcccag |
| | | | accctcaaccaatcggagaacctcccgcagccccctcaggtgtgggatct |
| | | | cttacaatggcttcaggtggtggcgcaccagtggcagacaataacgaagg |
| | | | tgccgatggagtgggtagttcctcgggaaattggcattgcgattcccaat |
| | | | ggctgggggacagagtcatcaccaccagcacccgaacctgggccctgccc |
| | | | acctacaacaatcacctctacaagcaaatctccaacagcacatctggagg |
| | | | atcttcaaatgacaacgcctacttcggctacagcaccccctgggggtatt |
| | | | ttgacttcaacagattccactgccacttctcaccacgtgactggcagcga |
| | | | ctcatcaacaacaactggggattccggcctaagcgactcaacttcaagct |
| | | | cttcaacattcaggtcaaagaggttacggacaacaatggagtcaagacca |
| | | | tcgccaataaccttaccagcacggtccaggtcttcacggactcagactat |
| | | | cagctcccgtacgtgctcgggtcggctcacgagggctgcctcccgccgtt |
| | | | cccagcggacgttttcatgattcctcagtacgggtatctgacgcttaatg |
| | | | atggaagccaggccgtgggtcgttcgtccttttactgcctggaatatttc |
| | | | ccgtcgcaaatgctaagaacgggtaacaacttccagttcagctacgagtt |
| | | | tgagaacgtacctttccatagcagctacgctcacagccaaagcctggacc |
| | | | gactaatgaatccactcatcgaccaatacttgtactatctctcTaGAact |
| | | | attAACGGTTCTGGACAGAATCAAcaaacgctaaaattcagtgtggccgg |
| | | | acccagcaacatggctgtccagggaagaaactacatacctggacccagct |
| | | | accgacaacaacgtgtctcaaccactgtgactcaaaacaacaacagcgaa |
| | | | tttgcttggcctggagcttcttcttgggctctcaatggacgtaatagctt |
| | | | gatgaatcctggacctgctatggccagccacaaagaaggagaggaccgtt |
| | | | tctttcctttgtctggatctttaatttttggcaaacaaggTacCggCaga |
| | | | gacaacgtggatgcggacaaagtcatgataaccaacgaagaagaaattaa |
| | | | aactactaacccggtagcaacggagtcctatggacaagtggccacaaacc |
| | | | accagagtGCGCAGGGGAAACTTCCTCGGGAATTTGCGCAGGCTCAAacc |
| | | | ggttgggttcaaaaccaaggaatacttccgggtatggtttggcaggacag |
| | | | agatgtgtacctgcaaggacccatttgggccaaaattcctcacacggacg |
| | | | gcaactttcacccttctccgctgatgggagggtttggaatgaagcacccg |
| | | | cctcctcagatcctcatcaaaaacacacctgtacctgcggatcctccaac |
| | | | ggccttcaacaaggacaagctgaactctttcatcacccagtattctactg |
| | | | gccaagtcagcgtggagatcgagtgggagctgcagaaggaaaacagcaag |
| | | | cgctggaacccggagatccagtacacttccaactattacaagtctaataa |
| | | | tgttgaatttgctgttaatactgaaggtgtatatagtgaaccccgcccca |
| | | | ttggcaccagatacctgactcgtaatctg |
| 56 | DNA | Adeno- | atggctgccgatggttatcttccagattggctcgaggacaaccttagtga |
| | | Associated | aggaattcgcgagtggtgggctttgaaacctggagcccctcaacccaagg |
| | | Virus 9 | caaatcaacaacatcaagacaacgctcgaggtcttgtgcttccgggttac |
| | | comprising | aaataccttggacccggcaacggactcgacaagggggagccggtcaacgc |
| | | SEQ | agcagacgcggcggccctcgagcacgacaaggcctacgaccagcagctca |
| | | ID NO: 4 | aggccggagacaacccgtacctcaagtacaaccacgccgacgccgagttc |
| | | | caggagcggctcaaagaagatacgtcttttgggggcaacctcgggcgagc |
| | | | agtcttccaggccaaaaagaggcttcttgaacctcttggtctggttgagg |
| | | | aagcggctaagacggctcctggaaagaagaggcctgtagagcagtctcct |
| | | | caggaaccggactcctccgcgggtattggcaaatcgggtgcacagcccgc |
| | | | taaaaagagactcaatttcggtcagactggcgacacagagtcagtcccag |
| | | | accctcaaccaatcggagaacctcccgcagccccctcaggtgtgggatct |
| | | | cttacaatggcttcaggtggtggcgcaccagtggcagacaataacgaagg |
| | | | tgccgatggagtgggtagttcctcgggaaattggcattgcgattcccaat |
| | | | ggctgggggacagagtcatcaccaccagcacccgaacctgggccctgccc |
| | | | acctacaacaatcacctctacaagcaaatctccaacagcacatctggagg |
| | | | atcttcaaatgacaacgcctacttcggctacagcaccccctgggggtatt |
| | | | ttgacttcaacagattccactgccacttctcaccacgtgactggcagcga |
| | | | ctcatcaacaacaactggggattccggcctaagcgactcaacttcaagct |
| | | | cttcaacattcaggtcaaagaggttacggacaacaatggagtcaagacca |
| | | | tcgccaataaccttaccagcacggtccaggtcttcacggactcagactat |
| | | | cagctcccgtacgtgctcgggtcggctcacgagggctgcctcccgccgtt |
| | | | cccagcggacgttttcatgattcctcagtacgggtatctgacgcttaatg |
| | | | atggaagccaggccgtgggtcgttcgtccttttactgcctggaatatttc |
| | | | ccgtgcaaatgctaagaacgggtaacaacttccagttcagctacgagttt |
| | | | gagaacgtacctttccatagcagctacgctcacagccaaagcctggaccg |
| | | | actaatgaatccactcatcgaccaatacttgtactatctctcTaGAacta |
| | | | ttAACGGTTCTGGACAGAATCAAcaaacgctaaaattcagtgtggccgga |
| | | | cccagcaacatggctgtccagggaagaaactacatacctggacccagcta |
| | | | ccgacaacaacgtgtctcaaccactgtgactcaaaacaacaacagcgaat |
| | | | ttgcttggcctggagcttcttcttgggctctcaatggacgtaatagcttg |
| | | | atgaatcctggacctgctatggccagccacaaagaaggagaggaccgttt |
| | | | ctttcctttgtctggatctttaatttttggcaaacaaggTacCggCagag |
| | | | acaacgtggatgcggacaaagtcatgataaccaacgaagaagaaattaaa |
| | | | actactaacccggtagcaacggagtcctatggacaagtggccacaaacca |
| | | | ccagagtGCACAAGGCAAGTTGCCTAGAGAATTTGCGCAGGCACAGaccg |
| | | | gttgggttcaaaaccaaggaatacttccgggtatggtttggcaggacaga |
| | | | gatgtgtacctgcaaggacccatttgggccaaaattcctcacacggacgg |
| | | | caactttcacccttctccgctgatgggagggtttggaatgaagcacccgc |
| | | | ctcctcagatcctcatcaaaaacacacctgtacctgcggatcctccaacg |
| | | | gccttcaacaaggacaagctgaactctttcatcacccagtattctactgg |
| | | | ccaagtcagcgtggagatcgagtgggagctgcagaaggaaaacagcaagc |
| | | | gctggaacccggagatccagtacacttccaactattacaagtctaataat |
| | | | gttgaatttgctgttaatactgaaggtgtatatagtgaaccccgccccat |
| | | | tggcaccagatacctgactcgtaatctg |
| 57 | DNA | Adeno- | atggctgccgatggttatcttccagattggctcgaggacaaccttagtga |
| | | Associated | aggaattcgcgagtggtgggctttgaaacctggagcccctcaacccaagg |
| | | Virus 9 | caaatcaacaacatcaagacaacgctcgaggtcttgtgcttccgggttac |
| | | comprising | aaataccttggacccggcaacggactcgacaagggggagccggtcaacgc |
| | | SEQ | agcagacgcggcggccctcgagcacgacaaggcctacgaccagcagctca |
| | | ID NO: 4 | aggccggagacaacccgtacctcaagtacaaccacgccgacgccgagttc |
| | | | caggagcggctcaaagaagatacgtcttttgggggcaacctcgggcgagc |
| | | | agtcttccaggccaaaaagaggcttcttgaacctcttggtctggttgagg |
| | | | aagcggctaagacggctcctggaaagaagaggcctgtagagcagtctcct |
| | | | caggaaccggactcctccgcgggtattggcaaatcgggtgcacagcccgc |
| | | | taaaaagagactcaatttcggtcagactggcgacacagagtcagtcccag |
| | | | accctcaaccaatcggagaacctcccgcagccccctaggtgtgggatctc |
| | | | ttacaatggcttcaggtggtggcgcaccagtggcagacaataacgaaggt |
| | | | gccgatggagtgggtagttcctcgggaaattggcattgcgattcccaatg |
| | | | gctgggggacagagtcatcaccaccagcacccgaacctgggccctgccca |
| | | | cctacaacaatcacctctacaagcaaatctccaacagcacatctggagga |
| | | | tcttcaaatgacaacgcctacttcggctacagcaccccctgggggtattt |
| | | | tgacttcaacagattccactgccacttctcaccacgtgactggcagcgac |
| | | | tcatcaacaacaactggggattccggcctaagcgactcaacttcaagctc |
| | | | ttcaacattcaggtcaaagaggttacggacaacaatggagtcaagaccat |
| | | | cgccaataaccttaccagcacggtccaggtcttcacggactcagactatc |
| | | | agctcccgtacgtgctcgggtcggctcacgagggctgcctcccgccgttc |
| | | | ccagcggacgttttcatgattcctcagtacgggtatctgacgcttaatga |
| | | | tggaagccaggccgtgggtcgttcgtccttttactgcctggaatatttcc |
| | | | cgtcgcaaatgctaagaacgggtaacaacttccagttcagctacgagttt |
| | | | gagaacgtacctttccatagcagctacgctcacagccaaagcctggaccg |
| | | | actaatgaatccactcatcgaccaatacttgtactatctctcTaGAacta |
| | | | ttAACGGTTCTGGACAGAATCAAcaaacgctaaaattcagtgtggccgga |
| | | | cccagcaacatggctgtccagggaagaaactacatacctggacccagcta |
| | | | ccgacaacaacgtgtctcaaccactgtgactcaaaacaacaacagcgaat |
| | | | ttgcttggcctggagcttcttcttgggctctcaatggacgtaatagcttg |
| | | | atgaatcctggacctgctatggccagccacaaagaaggagaggaccgttt |
| | | | ctttcctttgtctggatctttaatttttggcaaacaaggTacCggCagag |
| | | | acaacgtggatgcggacaaagtcatgataaccaacgaagaagaaattaaa |
| | | | actactaacccggtagcaacggagtcctatggacaagtggccacaaacca |
| | | | ccagagtGCTCAAGGGAAACTTCCTCGTGAGTTTGCCCAAGCTCAGaccg |
| | | | gttgggttcaaaaccaaggaatacttccgggtatggtttggcaggacaga |
| | | | gatgtgtacctgcaaggacccatttgggccaaaattcctcacacggacgg |
| | | | caactttcacccttctccgctgatgggagggtttggaatgaagcacccgc |
| | | | ctcctcagatcctcatcaaaaacacacctgtacctgcggatcctccaacg |
| | | | gccttcaacaaggacaagctgaactctttcatcacccagtattctactgg |
| | | | ccaagtcagcgtggagatcgagtgggagctgcagaaggaaaacagcaagc |
| | | | gctggaacccggagatccagtacacttccaactattacaagtctaataat |
| | | | gttgaatttgctgttaatactgaaggtgtatatagtgaaccccgccccat |
| | | | tggcaccagatacctgactcgtaatctg |
| 58 | DNA | Adeno- | atggctgccgatggttatcttccagattggctcgaggacaaccttagtga |
| | | Associated | aggaattcgcgagtggtgggctttgaaacctggagcccctcaacccaagg |
| | | Virus | caaatcaacaacatcaagacaacgctcgaggtcttgtgcttccgggttac |
| | | comprising | aaataccttggacccggcaacggactcgacaagggggagccggtcaacgc |
| | | SEQ | agcagacgcggcggccctcgagcacgacaaggcctacgaccagcagctca |
| | | ID NO: 49 | aggrcggagacaacccgtacctcaagtacaaccacgccgacgccgagttc |
| | | | caggagcggctcaaagaagatacgtcttttgggggcaacctcgggcgagc |
| | | | agtcttccaggccaaaaagaggcttcttgaacctcttggtctggttgagg |
| | | | aagcggctaagacggctcctggaaagaagaggcctgtagagcagtctcct |
| | | | caggaaccggactcctccgcgggtattggcaaatcgggtgcacagcccgc |
| | | | taaaaagagactcaatttcggtcagactggcgacacagagtcagtcccag |
| | | | accctcaaccaatcggagaacctcccgcagccccctcaggtgtgggatct |
| | | | cttacaatggcttcaggtggtggcgcaccagtggcagacaataacgaagg |
| | | | tgccgatggagtgggtagttcctcgggaaattggcattgcgattcccaat |
| | | | ggctgggggacagagtcatcaccaccagcacccgaacctgggccctgccc |
| | | | acctacaacaatcacctctacaagcaaatctccaacagcacatctggagg |
| | | | atcttcaaatgacaacgcctacttcggctacagcaccccctgggggtatt |
| | | | ttgacttcaacagattccactgccacttctcaccacgtgactggcagcga |
| | | | ctcatcaacaacaactggggattccggcctaagcgactcaacttcaagct |
| | | | cttcaacattcaggtcaaagaggttacggacaacaatggagtcaagacca |
| | | | tcgccaataaccttaccagcacggtccaggtcttcacggactcagactat |
| | | | cagctcccgtacgtgctcgggtcggctcacgagggctgcctcccgccgtt |
| | | | cccagcggacgttttcatgattcctcagtacgggtatctgacgcttaatg |
| | | | atggaagccaggccgtgggtcgttcgtccttttactgcctggaatatttc |
| | | | ccgtcgcaaatgctaagaacgggtaacaacttccagttcagctacgagtt |
| | | | tgagaacgtacctttccatagcagctacgctcacagccaaagcctggacc |
| | | | gactaatgaatccactcatcgaccaatacttgtactatctctcTaGAact |
| | | | attAACGGTTCTGGACAGAATCAAcaaacgctaaaattcagtgtggccgg |
| | | | acccagcaacatggctgtccagggaagaaactacatacctggacccagct |
| | | | accgacaacaacgtgtctcaaccactgtgactcaaaacaacaacagcgaa |
| | | | tttgcttggcctggagcttcttcttgggctctcaatggacgtaatagctt |
| | | | gatgaatcctggacctgctatggccagccacaaagaaggagaggaccgtt |
| | | | tctttcctttgtctggatctttaatttttggcaaacaaggTacCggCaga |
| | | | gacaacgtggatgcggacaaagtcatgataaccaacgaagaagaaattaa |
| | | | aactactaacccggtagcaacggagtcctatggacaagtggccacaaacc |
| | | | accagagtGCGCAGGGAAAGCTCCCCCGCGAATTCGCTCAGGCACAAacc |
| | | | ggttgggttcaaaaccaaggaatacttccgggtatggtttggcaggacag |
| | | | agatgtgtacctgcaaggacccatttgggccaaaattcctcacacggacg |
| | | | gcaactttcacccttctccgctgatgggagggtttggaatgaagcacccg |
| | | | cctcctcagatcctcatcaaaaacacacctgtacctgcggatcctccaac |
| | | | ggccttcaacaaggacaagctgaactctttcatcacccagtattctactg |
| | | | gccaagtcagcgtggagatcgagtgggagctgcagaaggaaaacagcaag |
| | | | cgctggaacccggagatccagtacacttccaactattacaagtctaataa |
| | | | tgttgaatttgctgttaatactgaaggtgtatatagtgaaccccgcccca |
| | | | ttggcaccagatacctgactcgtaatctg |
| 59 | DNA | Adeno- | atggctgccgatggttatcttccagattggctcgaggacaaccttagtga |
| | | Associated | aggaattcgcgagtggtgggctttgaaacctggagcccctcaacccaagg |
| | | Virus 9 | caaatcaacaacatcaagacaacgctcgaggtcttgtgcttccgggttac |
| | | comprising | aaataccttggacccggcaacggactcgacaagggggagccggtcaacgc |
| | | SEQ | agcagacgcggcggccctcgagcacgacaaggcctacgaccagcagctca |
| | | ID NO: 4 | aggccggagacaacccgtacctcaagtacaaccacgccgacgccgagttc |
| | | | caggagcggctcaaagaagatacgtcttttgggggcaacctcgggcgagc |
| | | | agtcttccaggccaaaaagaggcttcttgaacctcttggtctggttgagg |
| | | | aagcggctaagacggctcctggaaagaagaggcctgtagagcagtctcct |
| | | | caggaaccggactcctccgcgggtattggcaaatcgggtgcacagcccgc |
| | | | taaaaagagactcaatttcggtcagactggcgacacagagtcagtcccag |
| | | | accctcaaccaatcggagaacctcccgcagccccctcaggtgtgggatct |
| | | | cttacaatggcttcaggtggtggcgcaccagtggcagacaataacgaagg |
| | | | tgccgatggagtgggtagttcctcgggaaattggcattgcgattcccaat |
| | | | ggctgggggacagagtcatcaccaccagcacccgaacctgggccctgccc |
| | | | acctacaacaatcacctctacaagcaaatctccaacagcacatctggagg |
| | | | atcttcaaatgacaacgcctacttcggctacagcaccccctgggggtatt |
| | | | ttgacttcaacagattccactgccacttctcaccacgtgactggcagcga |
| | | | ctcatcaacaacaactggggattccggcctaagcgactcaacttcaagct |
| | | | cttcaacattcaggtcaaagaggttacggacaacaatggagtcaagacca |
| | | | tcgccaataaccttaccagcacggtccaggtcttcacggactcagactat |
| | | | cagctcccgtacgtgctcgggtcggctcacgagggctgcctcccgccgtt |
| | | | cccagcggacgttttcatgattcctcagtacgggtatctgacgcttaatg |
| | | | atggaagccaggccgtgggtcgttcgtccttttactgcctggaatatttc |
| | | | ccgtcgcaaatgctaagaacgggtaacaacttccagttcagctacgagtt |
| | | | tgagaacgtacctttccatagcagctacgctcacagccaaagcctggacc |
| | | | gactaatgaatccactcatcgaccaatacttgtactatctctcTaGAact |
| | | | attAACGGTTCTGGACAGAATCAAcaaacgctaaaattcagtgtggccgg |
| | | | acccagcaacatggctgtccagggaagaaactacatacctggacccagct |
| | | | accgacaacaacgtgtctcaaccactgtgactcaaaacaacaacagcgaa |
| | | | tttgcttggcctggagcttcttcttgggctctcaatggacgtaatagctt |
| | | | gatgaatcctggacctgctatggccagccacaaagaaggagaggaccgtt |
| | | | tctttcctttgtctggatctttaatttttggcaaacaaggTacCggCaga |
| | | | gacaacgtggatgcggacaaagtcatgataaccaacgaagaagaaattaa |
| | | | aactactaacccggtagcaacggagtcctatggacaagtggccacaaacc |
| | | | accagagtGCGCAGGGTAAACTGCCCCGAGAGTTCGCTCAAGCTCAAacc |
| | | | ggttgggttcaaaaccaaggaatacttccgggtatggtttggcaggacag |
| | | | agatgtgtacctgcaaggacccatttgggccaaaattcctcacacggacg |
| | | | gcaactttcacccttctccgctgatgggagggtttggaatgaagcacccg |
| | | | cctcctcagatcctcatcaaaaacacacctgtacctgcggatcctccaac |
| | | | ggccttcaacaaggacaagctgaactctttcatcacccagtattctactg |
| | | | gccaagtcagcgtggagatcgagtgggagctgcagaaggaaaacagcaag |
| | | | cgctggaacccggagatccagtacacttccaactattacaagtctaataa |
| | | | tgttgaatttgctgttaatactgaaggtgtatatagtgaaccccgcccca |
| | | | ttggcaccagatacctgactcgtaatctg |
| 60 | DNA | Adeno- | atggctgccgatggttatcttccagattggctcgaggacaaccttagtga |
| | | Associated | aggaattcgcgagtggtgggctttgaaacctggagcccctcaacccaagg |
| | | Virus 9 | caaatcaacaacatcaagacaacgctcgaggtcttgtgcttccgggttac |
| | | comprising | aaataccttggacccggcaacggactcgacaagggggagccggtcaacgc |
| | | SEQ | agcagacgcggcggccctcgagcacgacaaggcctacgaccagcagctca |
| | | ID NO: 4 | aggccggagacaacccgtacctcaagtacaaccacgccgacgccgagttc |
| | | | caggagcggctcaaagaagatacgtcttttgggggcaacctcgggcgagc |
| | | | agtcttccaggccaaaaagaggcttcttgaacctcttggtctggttgagg |
| | | | aagcggctaagacggctcctggaaagaagaggcctgtagagcagtctcct |
| | | | caggaaccggactcctccgcgggtattggcaaatcgggtgcacagcccgc |
| | | | taaaaagagactcaatttcggtcagactggcgacacagagtcagtcccag |
| | | | accctcaaccaatcggagaacctcccgcagccccctcaggtgtgggatct |
| | | | cttacaatggcttcaggtggtggcgcaccagtggcagacaataacgaagg |
| | | | tgccgatggagtgggtagttcctcgggaaattggcattgcgattcccaat |
| | | | ggctgggggacagagtcatcaccaccagcacccgaacctgggccctgccc |
| | | | acctacaacaatcacctctacaagcaaatctccaacagcacatctggagg |
| | | | atcttcaaatgacaacgcctacttcggctacagcaccccctgggggtatt |
| | | | ttgacttcaacagattccactgccacttctcaccacgtgactggcagcga |
| | | | ctcatcaacaacaactggggattccggcctaagcgactcaacttcaagct |
| | | | cttcaacattcaggtcaaagaggttacggacaacaatggagtcaagacca |
| | | | tcgccaataaccttaccagcacggtccaggtcttcacggactcagactat |
| | | | cagctcccgtacgtgctcgggtcggctcacgagggctgcctcccgccgtt |
| | | | cccagcggacgttttcatgattcctcagtacgggtatctgacgcttaatg |
| | | | atggaagccaggccgtgggtcgttcgtccttttactgcctggaatatttc |
| | | | ccgtcgcaaatgctaagaacgggtaacaacttccagttcagctacgagtt |
| | | | tgagaacgtacctttccatagcagctacgctcacagccaaagcctggacc |
| | | | gactaatgaatccactcatcgaccaatacttgtactatctctcTaGAact |
| | | | attAACGGTTCTGGACAGAATCAAcaaacgctaaaattcagtgtggccgg |
| | | | acccagcaacatggctgtccagggaagaaactacatacctggacccagct |
| | | | accgacaacaacgtgtctcaaccactgtgactcaaaacaacaacagcgaa |
| | | | tttgcttggcctggagcttcttcttgggctctcaatggacgtaatagctt |
| | | | gatgaatcctggacctgctatggccagccacaaagaaggagaggaccgtt |
| | | | tctttcctttgtctggatctttaatttttggcaaacaaggTacCggCaga |
| | | | gacaacgtggatgcggacaaagtcatgataaccaacgaagaagaaattaa |
| | | | aactactaacccggtagcaacggagtcctatggacaagtggccacaaacc |
| | | | accagagtGCCCAGGGAAAGCTGCCGCGCGAATTTGCCCAGGCGCAAacc |
| | | | ggttgggttcaaaaccaaggaatacttccgggtatggtttggcaggacag |
| | | | agatgtgtacctgcaaggacccatttgggccaaaattcctcacacggacg |
| | | | gcaactttcacccttctccgctgatgggagggtttggaatgaagcacccg |
| | | | cctcctcagatcctcatcaaaaacacacctgtacctgcggatcctccaac |
| | | | ggccttcaacaaggacaagctgaactctttcatcacccagtattctactg |
| | | | gccaagtcagcgtggagatcgagtgggagctgcagaaggaaaacagcaag |
| | | | cgctggaacccggagatccagtacacttccaactattacaagtctaataa |
| | | | tgttgaatttgctgttaatactgaaggtgtatatagtgaaccccgcccca |
| | | | ttggcaccagatacctgactcgtaatctg |
| 61 | DNA | Adeno- | atggctgccgatggttatcttccagattggctcgaggacaaccttagtga |
| | | Associated | aggaattcgcgagtggtgggctttgaaacctggagcccctcaacccaagg |
| | | Virus 9 | caaatcaacaacatcaagacaacgctcgaggtcttgtgcttccgggttac |
| | | comprising | aaataccttggacccggcaacggactcgacaagggggagccggtcaacgc |
| | | SEQ | agcagacgcggcggccctcgagcacgacaaggcctacgaccagcagctca |
| | | ID NO: 5 | aggccggagacaacccgtacctcaagtacaaccacgccgacgccgagttc |
| | | | caggagcggctcaaagaagatacgtcttttgggggcaacctcgggcgagc |
| | | | agtcttccaggccaaaaagaggcttcttgaacctcttggtctggttgagg |
| | | | aagcggctaagacggctcctggaaagaagaggcctgtagagcagtctcct |
| | | | caggaaccggactcctccgcgggtattggcaaatcgggtgcacagcccgc |
| | | | taaaaagagactcaatttcggtcagactggcgacacagagtcagtcccag |
| | | | accctcaaccaatcggagaacctcccgcagccccctcaggtgtgggatct |
| | | | cttacaatggcttcaggtggtggcgcaccagtggcagacaataacgaagg |
| | | | tgccgatggagtgggtagttcctcgggaaattggcattgcgattcccaat |
| | | | ggctgggggacagagtcatcaccaccagcacccgaacctgggccctgccc |
| | | | acctacaacaatcacctctacaagcaaatctccaacagcacatctggagg |
| | | | atcttcaaatgacaacgcctacttcggctacagcaccccctgggggtatt |
| | | | ttgacttcaacagattccactgccacttctcaccacgtgactggcagcga |
| | | | ctcatcaacaacaactggggattccggcctaagcgactcaacttcaagct |
| | | | cttcaacattcaggtcaaagaggttacggacaacaatggagtcaagacca |
| | | | tcgccaataaccttaccagcacggtccaggtcttcacggactcagactat |
| | | | cagctcccgtacgtgctcgggtcggctcacgagggctgcctcccgccgtt |
| | | | cccagcggacgttttcatgattcctcagtacgggtatctgacgcttaatg |
| | | | atggaagccaggccgtgggtcgttcgtccttttactgcctggaatatttc |
| | | | ccgtcgcaaatgctaagaacgggtaacaacttccagttcagctacgagtt |
| | | | tgagaacgtacctttccatagcagctacgctcacagccaaagcctggacc |
| | | | gactaatgaatccactcatcgaccaatacttgtactatctctcTaGAact |
| | | | attAACGGTTCTGGACAGAATCAAcaaacgctaaaattcagtgtggccgg |
| | | | acccagcaacatggctgtccagggaagaaactacatacctggacccagct |
| | | | accgacaacaacgtgtctcaaccactgtgactcaaaacaacaacagcgaa |
| | | | tttgcttggcctggagcttcttcttgggctctcaatggacgtaatagctt |
| | | | gatgaatcctggacctgctatggccagccacaaagaaggagaggaccgtt |
| | | | tctttcctttgtctggatctttaatttttggcaaacaaggTacCggCaga |
| | | | gacaacgtggatgcggacaaagtcatgataaccaacgaagaagaaattaa |
| | | | aactactaacccggtagcaacggagtcctatggacaagtggccacaaacc |
| | | | accagagtGCACAGCACAATTTCCCTAATGAATTTGCTCAAGCTCAAacc |
| | | | ggttgggttcaaaaccaaggaatacttccgggtatggtttggcaggacag |
| | | | agatgtgtacctgcaaggacccatttgggccaaaattcctcacacggacg |
| | | | gcaactttcacccttctccgctgatgggagggtttggaatgaagcacccg |
| | | | cctcctcagatcctcatcaaaaacacacctgtacctgcggatcctccaac |
| | | | ggccttcaacaaggacaagctgaactctttcatcacccagtattctactg |
| | | | gccaagtcagcgtggagatcgagtgggagctgcagaaggaaaacagcaag |
| | | | cgctggaacccggagatccagtacacttccaactattacaagtctaataa |
| | | | tgttgaatttgctgttaatactgaaggtgtatatagtgaaccccgcccca |
| | | | ttggcaccagatacctgactcgtaatctg |
| 62 | DNA | Adeno- | atggctgccgatggttatcttccagattggctcgaggacaaccttagtga |
| | | Associated | aggaattcgcgagtggtgggctttgaaacctggagcccctcaacccaagg |
| | | Virus 9 | caaatcaacaacatcaagacaacgctcgaggtcttgtgcttccgggttac |
| | | comprising | aaataccttggacccggcaacggactcgacaagggggagccggtcaacgc |
| | | SEQ | agcagacgcggcggccctcgagcacgacaaggcctacgaccagcagctca |
| | | ID NO: 5 | aggccggagacaacccgtacctcaagtacaaccacgccgacgccgagttc |
| | | | caggagcggctcaaagaagatacgtcttttgggggcaacctcgggcgagc |
| | | | agtcttccaggccaaaaagaggcttcttgaacctcttggtctggttgagg |
| | | | aagcggctaagacggctcctggaaagaagaggcctgtagagcagtctcct |
| | | | caggaaccggactcctccgcgggtattggcaaatcgggtgcacagcccgc |
| | | | taaaaagagactcaatttcggtcagactggcgacacagagtcagtcccag |
| | | | accctcaaccaatcggagaacctcccgcagccccctcaggtgtgggatct |
| | | | cttacaatggcttcaggtggtggcgcaccagtggcagacaataacgaagg |
| | | | tgccgatggagtgggtagttcctcgggaaattggcattgcgattcccaat |
| | | | ggctgggggacagagtcatcaccaccagcacccgaacctgggccctgccc |
| | | | acctacaacaatcacctctacaagcaaatctccaacagcacatctggagg |
| | | | atcttcaaatgacaacgcctacttcggctacagcaccccctgggggtatt |
| | | | ttgacttcaacagattccactgccacttctcaccacgtgactggcagcga |
| | | | ctcatcaacaacaactggggattccggcctaagcgactcaacttcaagct |
| | | | cttcaacattcaggtcaaagaggttacggacaacaatggagtcaagacca |
| | | | tcgccaataaccttaccagcacggtccaggtcttcacggactcagactat |
| | | | cagctcccgtacgtgctcgggtcggctcacgagggctgcctcccgccgtt |
| | | | cccagcggacgttttcatgattcctcagtacgggtatctgacgcttaatg |
| | | | atggaagccaggccgtgggtcgttcgtccttttactgcctggaatatttc |
| | | | ccgtcgcaaatgctaagaacgggtaacaacttccagttcagctacgagtt |
| | | | tgagaacgtacctttccatagcagctacgctcacagccaaagcctggacc |
| | | | gactaatgaatccactcatcgaccaatacttgtactatctctcTaGAact |
| | | | attAACGGTTCTGGACAGAATCAAcaaacgctaaaattcagtgtggccgg |
| | | | acccagcaacatggctgtccagggaagaaactacatacctggacccagct |
| | | | accgacaacaacgtgtctcaaccactgtgactcaaaacaacaacagcgaa |
| | | | tttgcttggcctggagcttcttcttgggctctcaatggacgtaatagctt |
| | | | gatgaatcctggacctgctatggccagccacaaagaaggagaggaccgtt |
| | | | tctttcctttgtctggatctttaatttttggcaaacaaggTacCggCaga |
| | | | gacaacgtggatgcggacaaagtcatgataaccaacgaagaagaaattaa |
| | | | aactactaacccggtagcaacggagtcctatggacaagtggccacaaacc |
| | | | accagagtGCCCAGCATAACTTTCCAAACGAATTCGCTCAGGCCCAGacc |
| | | | ggttgggttcaaaaccaaggaatacttccgggtatggtttggcaggacag |
| | | | agatgtgtacctgcaaggacccatttgggccaaaattcctcacacggacg |
| | | | gcaactttcacccttctccgctgatgggagggtttggaatgaagcacccg |
| | | | cctcctcagatcctcatcaaaaacacacctgtacctgcggatcctccaac |
| | | | ggccttcaacaaggacaagctgaactctttcatcacccagtattctactg |
| | | | gccaagtcagcgtggagatcgagtgggagctgcagaaggaaaacagcaag |
| | | | cgctggaacccggagatccagtacacttccaactattacaagtctaataa |
| | | | tgttgaatttgctgttaatactgaaggtgtatatagtgaaccccgcccca |
| | | | ttggcaccagatacctgactcgtaatctg |
| 63 | DNA | Adeno- | atggctgccgatggttatcttccagattggctcgaggacaaccttagtga |
| | | Associated | aggaattcgcgagtggtgggctttgaaacctggagcccctcaacccaagg |
| | | Virus 9 | caaatcaacaacatcaagacaacgctcgaggtcttgtgcttccgggttac |
| | | comprising | aaataccttggacccggcaacggactcgacaagggggagccggtcaacgc |
| | | SEQ | agcagacgcggggccctcgagcacgacaaggcctacgaccagcagctcaa |
| | | ID NO: 5 | ggccggagacaacccgtacctcaagtacaaccacgccgacgccgagttcc |
| | | | aggagcggctcaaagaagatacgtcttttgggggcaacctcgggcgagca |
| | | | gtcttccaggccaaaaagaggcttcttgaacctcttggtctggttgagga |
| | | | agcggctaagacggctcctggaaagaagaggcctgtagagcagtctcctc |
| | | | aggaaccggactcctccgcgggtattggcaaatcgggtgcacagcccgct |
| | | | aaaaagagactcaatttcggtcagactggcgacacagagtcagtcccaga |
| | | | ccctcaaccaatcggagaacctcccgcagccccctcaggtgtgggatctc |
| | | | ttacaatggcttcaggtggtggcgcaccagtggcagacaataacgaaggt |
| | | | gccgatggagtgggtagttcctcgggaaattggcattgcgattcccaatg |
| | | | gctgggggacagagtcatcaccaccagcacccgaacctgggccctgccca |
| | | | cctacaacaatcacctctacaagcaaatctccaacagcacatctggagga |
| | | | tcttcaaatgacaacgcctacttcggctacagcaccccctgggggtattt |
| | | | tgacttcaacagattccactgccacttctcaccacgtgactggcagcgac |
| | | | tcatcaacaacaactggggattccggcctaagcgactcaacttcaagctc |
| | | | ttcaacattcaggtcaaagaggttacggacaacaatggagtcaagaccat |
| | | | cgccaataaccttaccagcacggtccaggtcttcacggactcagactatc |
| | | | agctcccgtacgtgctcgggtcggctcacgagggctgcctcccgccgttc |
| | | | ccagcggacgttttcatgattcctcagtacgggtatctgacgcttaatga |
| | | | tggaagccaggccgtgggtcgttcgtccttttactgcctggaatatttcc |
| | | | cgtcgcaaatgctaagaacgggtaacaacttccagttcagctacgagttt |
| | | | gagaacgtacctttccatagcagctacgctcacagccaaagcctggaccg |
| | | | actaatgaatccactcatcgaccaatacttgtactatctctcTaGAacta |
| | | | ttAACGGTTCTGGACAGAATCAAcaaacgctaaaattcagtgtggccgga |
| | | | cccagcaacatggctgtccagggaagaaactacatacctggacccagcta |
| | | | ccgacaacaacgtgtctcaaccactgtgactcaaaacaacaacagcgaat |
| | | | ttgcttggcctggagcttcttcttgggctctcaatggacgtaatagcttg |
| | | | atgaatcctggacctgctatggccagccacaaagaaggagaggaccgttt |
| | | | ctttcctttgtctggatctttaatttttggcaaacaaggTacCggCagag |
| | | | acaacgtggatgcggacaaagtcatgataaccaacgaagaagaaattaaa |
| | | | actactaacccggtagcaacggagtcctatggacaagtggccacaaacca |
| | | | ccagagtGCCCAGCATAATTTCCCGAACGAGTTTGCACAAGCTCAAaccg |
| | | | gttgggttcaaaaccaaggaatacttccgggtatggtttggcaggacaga |
| | | | gatgtgtacctgcaaggacccatttgggccaaaattcctcacacggacgg |
| | | | caactttcacccttctccgctgatgggagggtttggaatgaagcacccgc |
| | | | ctcctcagatcctcatcaaaaacacacctgtacctgcggatcctccaacg |
| | | | gccttcaacaaggacaagctgaactctttcatcacccagtattctactgg |
| | | | ccaagtcagcgtggagatcgagtgggagctgcagaaggaaaacagcaagc |
| | | | gctggaacccggagatccagtacacttccaactattacaagtctaataat |
| | | | gttgaatttgctgttaatactgaaggtgtatatagtgaaccccgccccat |
| | | | tggcaccagatacctgactcgtaatctg |
| 64 | DNA | Adeno- | atggctgccgatggttatcttccagattggctcgaggacaaccttagtga |
| | | Associated | aggaattcgcgagtggtgggctttgaaacctggagcccctcaacccaagg |
| | | Virus 9 | caaatcaacaacatcaagacaacgctcgaggtcttgtgcttccgggttac |
| | | comprising | aaataccttggacccggcaacggactcgacaagggggagccggtcaacgc |
| | | SEQ | agcagacgcggcggccctcgagcacgacaaggcctacgaccagcagctca |
| | | ID NO: 5 | aggccggagacaacccgtacctcaagtacaaccacgccgacgccgagttc |
| | | | caggagcggctcaaagaagatacgtcttttgggggcaacctcgggcgagc |
| | | | agtcttccaggccaaaaagaggcttcttgaacctcttggtctggttgagg |
| | | | aagcggctaagacggctcctggaaagaagaggcctgtagagcagtctcct |
| | | | caggaaccggactcctccgcgggtattggcaaatcgggtgcacagcccgc |
| | | | taaaaagagactcaatttcggtcagactggcgacacagagtcagtcccag |
| | | | accctcaaccaatcggagaacctcccgcagccccctcaggtgtgggatct |
| | | | cttacaatggcttcaggtggtggcgcaccagtggcagacaataacgaagg |
| | | | tgccgatggagtgggtagttcctcgggaaattggcattgcgattcccaat |
| | | | ggctgggggacagagtcatcaccaccagcacccgaacctgggccctgccc |
| | | | acctacaacaatcacctctacaagcaaatctccaacagcacatctggagg |
| | | | atcttcaaatgacaacgcctacttcggctacagcaccccctgggggtatt |
| | | | ttgacttcaacagattccactgccacttctcaccacgtgactggcagcga |
| | | | ctcatcaacaacaactggggattccggcctaagcgactcaacttcaagct |
| | | | cttcaacattcaggtcaaagaggttacggacaacaatggagtcaagacca |
| | | | tcgccaataaccttaccagcacggtccaggtcttcacggactcagactat |
| | | | cagctcccgtacgtgctcgggtcggctcacgagggctgcctcccgccgtt |
| | | | cccagcggacgttttcatgattcctcagtacgggtatctgacgcttaatg |
| | | | atggaagccaggccgtgggtcgttcgtccttttactgcctggaatatttc |
| | | | ccgtcgcaaatgctaagaacgggtaacaacttccagttcagctacgagtt |
| | | | tgagaacgtacctttccatagcagctacgctcacagccaaagcctggacc |
| | | | gactaatgaatccactcatcgaccaatacttgtactatctctcTaGAact |
| | | | attAACGGTTCTGGACAGAATCAAcaaacgctaaaattcagtgtggccgg |
| | | | acccagcaacatggctgtccagggaagaaactacatacctggacccagct |
| | | | accgacaacaacgtgtctcaaccactgtgactcaaaacaacaacagcgaa |
| | | | tttgcttggcctggagcttcttcttgggctctcaatggacgtaatagctt |
| | | | gatgaatcctggacctgctatggccagccacaaagaaggagaggaccgtt |
| | | | tctttcctttgtctggatctttaatttttggcaaacaaggTacCggCaga |
| | | | gacaacgtggatgcggacaaagtcatgataaccaacgaagaagaaattaa |
| | | | aactactaacccggtagcaacggagtcctatggacaagtggccacaaacc |
| | | | accagagtGCTCAACATAACTTTCCGAATGAATTCGCACAGGCTCAAacc |
| | | | ggttgggttcaaaaccaaggaatacttccgggtatggtttggcaggacag |
| | | | agatgtgtacctgcaaggacccatttgggccaaaattcctcacacggacg |
| | | | gcaactttcacccttctccgctgatgggagggtttggaatgaagcacccg |
| | | | cctcctcagatcctcatcaaaaacacacctgtacctgcggatcctccaac |
| | | | ggccttcaacaaggacaagctgaactctttcatcacccagtattctactg |
| | | | gccaagtcagcgtggagatcgagtgggagctgcagaaggaaaacagcaag |
| | | | cgctggaacccggagatccagtacacttccaactattacaagtctaataa |
| | | | tgttgaatttgctgttaatactgaaggtgtatatagtgaaccccgcccca |
| | | | ttggcaccagatacctgactcgtaatctg |
| 65 | DNA | Adeno- | atggctgccgatggttatcttccagattggctcgaggacaaccttagtga |
| | | Associated | aggaattcgcgagtggtgggctttgaaacctggagcccctcaacccaagg |
| | | Virus 9 | caaatcaacaacatcaagacaacgctcgaggtcttgtgcttccgggttac |
| | | comprising | aaataccttggacccggcaacggactcgacaagggggagccggtcaacgc |
| | | SEQ | agcagacgcggcggccctcgagcacgacaaggcctacgaccagcagctca |
| | | ID NO: 5 | aggccggagacaacccgtacctcaagtacaaccacgccgacgccgagttc |
| | | | caggagcggctcaaagaagatacgtcttttgggggcaacctcgggcgagc |
| | | | agtcttccaggccaaaaagaggcttcttgaacctcttggtctggttgagg |
| | | | aagcggctaagacggctcctggaaagaagaggcctgtagagcagtctcct |
| | | | caggaaccggactcctccgcgggtattggcaaatcgggtgcacagcccgc |
| | | | taaaaagagactcaatttcggtcagactggcgacacagagtcagtcccag |
| | | | accctcaaccaatcggagaacctcccgcagccccctcaggtgtgggatct |
| | | | cttacaatggcttcaggtggtggcgcaccagtggcagacaataacgaagg |
| | | | tgccgatggagtgggtagttcctcgggaaattggcattgcgattcccaat |
| | | | ggctgggggacagagtcatcaccaccagcacccgaacctgggccctgccc |
| | | | acctacaacaatcacctctacaagcaaatctccaacagcacatctggagg |
| | | | atcttcaaatgacaacgcctacttcggctacagcaccccctgggggtatt |
| | | | ttgacttcaacagattccactgccacttctcaccacgtgactggcagcga |
| | | | ctcatcaacaacaactggggattccggcctaagcgactcaacttcaagct |
| | | | cttcaacattcaggtcaaagaggttacggacaacaatggagtcaagacca |
| | | | tcgccaataaccttaccagcacggtccaggtcttcacggactcagactat |
| | | | cagctcccgtacgtgctcgggtcggctcacgagggctgcctcccgccgtt |
| | | | cccagcggacgttttcatgattcctcagtacgggtatctgacgcttaatg |
| | | | atggaagccaggccgtgggtcgttcgtccttttactgcctggaatatttc |
| | | | ccgtcgcaaatgctaagaacgggtaacaacttccagttcagctacgagtt |
| | | | tgagaacgtacctttccatagcagctacgctcacagccaaagcctggacc |
| | | | gactaatgaatccactcatcgaccaatacttgtactatctctcTaGAact |
| | | | attAACGGTTCTGGACAGAATCAAcaaacgctaaaattcagtgtggccgg |
| | | | acccagcaacatggctgtccagggaagaaactacatacctggacccagct |
| | | | accgacaacaacgtgtctcaaccactgtgactcaaaacaacaacagcgaa |
| | | | tttgcttggcctggagcttcttcttgggctctcaatggacgtaatagctt |
| | | | gatgaatcctggacctgctatggccagccacaaagaaggagaggaccgtt |
| | | | tctttcctttgtctggatctttaatttttggcaaacaaggTacCggCaga |
| | | | gacaacgtggatgcggacaaagtcatgataaccaacgaagaagaaattaa |
| | | | aactactaacccggtagcaacggagtcctatggacaagtggccacaaacc |
| | | | accagagtGCTCAACACAATTTCCCAAACGAATTCGCCCAAGCGCAGacc |
| | | | ggttgggttcaaaaccaaggaatacttccgggtatggtttggcaggacag |
| | | | agatgtgtacctgcaaggacccatttgggccaaaattcctcacacggacg |
| | | | gcaactttcacccttctccgctgatgggagggtttggaatgaagcacccg |
| | | | cctcctcagatcctcatcaaaaacacacctgtacctgcggatcctccaac |
| | | | ggccttcaacaaggacaagctgaactctttcatcacccagtattctactg |
| | | | gccaagtcagcgtggagatcgagtgggagctgcagaaggaaaacagcaag |
| | | | cgctggaacccggagatccagtacacttccaactattacaagtctaataa |
| | | | tgttgaatttgctgttaatactgaaggtgtatatagtgaaccccgcccca |
| | | | ttggcaccagatacctgactcgtaatctg |
| 66 | DNA | Adeno- | atggctgccgatggttatcttccagattggctcgaggacaaccttagtga |
| | | Associated | aggaattcgcgagtggtgggctttgaaacctggagcccctcaacccaagg |
| | | Virus 9 | caaatcaacaacatcaagacaacgctcgaggtcttgtgcttccgggttac |
| | | comprising | aaataccttggacccggcaacggactcgacaagggggagccggtcaacgc |
| | | SEQ | agcagacgcggcggccctcgagcacgacaaggcctacgaccagcagctca |
| | | ID NO: 5 | aggccggagacaacccgtacctcaagtacaaccacgccgacgccgagttc |
| | | | caggagcggctcaaagaagatacgtcttttgggggcaacctcgggcgagc |
| | | | agtcttccaggccaaaaagaggcttcttgaacctcttggtctggttgagg |
| | | | aagcggctaagacggctcctggaaagaagaggcctgtagagcagtctcct |
| | | | caggaaccggactcctccgcgggtattggcaaatcgggtgcacagcccgc |
| | | | taaaaagagactcaatttcggtcagactggcgacacagagtcagtcccag |
| | | | accctcaaccaatcggagaacctcccgcagccccctcaggtgtgggatct |
| | | | cttacaatggcttcaggtggtggcgcaccagtggcagacaataacgaagg |
| | | | tgccgatggagtgggtagttcctcgggaaattggcattgcgattcccaat |
| | | | ggctgggggacagagtcatcaccaccagcacccgaacctgggccctgccc |
| | | | acctacaacaatcacctctacaagcaaatctccaacagcacatctggagg |
| | | | atcttcaaatgacaacgcctacttcggctacagcaccccctgggggtatt |
| | | | ttgacttcaacagattccactgccacttctcaccacgtgactggcagcga |
| | | | ctcatcaacaacaactggggattccggcctaagcgactcaacttcaagct |
| | | | cttcaacattcaggtcaaagaggttacggacaacaatggagtcaagacca |
| | | | tcgccaataaccttaccagcacggtccaggtcttcacggactcagactat |
| | | | cagctcccgtacgtgctcgggtcggctcacgagggctgcctcccgccgtt |
| | | | cccagcggacgttttcatgattcctcagtacgggtatctgacgcttaatg |
| | | | atggaagccaggccgtgggtcgttcgtccttttactgcctggaatatttc |
| | | | ccgtcgcaaatgctaagaacgggtaacaacttccagttcagctacgagtt |
| | | | tgagaacgtacctttccatagcagctacgctcacagccaaagcctggacc |
| | | | gactaatgaatccactcatcgaccaatacttgtactatctctcTaGAact |
| | | | attAACGGTTCTGGACAGAATCAAcaaacgctaaaattcagtgtggccgg |
| | | | acccagcaacatggctgtccagggaagaaactacatacctggacccagct |
| | | | accgacaacaacgtgtctcaaccactgtgactcaaaacaacaacagcgaa |
| | | | tttgcttggcctggagcttcttcttgggctctcaatggacgtaatagctt |
| | | | gatgaatcctggacctgctatggccagccacaaagaaggagaggaccgtt |
| | | | tctttcctttgtctggatctttaatttttggcaaacaaggTacCggCaga |
| | | | gacaacgtggatgcggacaaagtcatgataaccaacgaagaagaaattaa |
| | | | aactactaacccggtagcaacggagtcctatggacaagtggccacaaacc |
| | | | accagagtGCCCAGCACAATTTCCCAAACGAGTTTGCCCAAGCACAGacc |
| | | | ggttgggttcaaaaccaaggaatacttccgggtatggtttggcaggacag |
| | | | agatgtgtacctgcaaggacccatttgggccaaaattcctcacacggacg |
| | | | gcaactttcacccttctccgctgatgggagggtttggaatgaagcacccg |
| | | | cctcctcagatcctcatcaaaaacacacctgtacctgcggatcctccaac |
| | | | ggccttcaacaaggacaagctgaactctttcatcacccagtattctactg |
| | | | gccaagtcagcgtggagatcgagtgggagctgcagaaggaaaacagcaag |
| | | | cgctggaacccggagatccagtacacttccaactattacaagtctaataa |
| | | | tgttgaatttgctgttaatactgaaggtgtatatagtgaaccccgcccca |
| | | | ttggcaccagatacctgactcgtaatctgatggctgccgatggttatctt |
| | | | ccagattggctcgaggacaaccttagtgaaggaattcgcgagtggtgggc |
| | | | tttgaaacctg |
| 67 | DNA | Adeno- | gagcccctcaacccaaggcaaatcaacaacatcaagacaacgctcgaggt |
| | | Associated | cttgtgcttccgggttacaaataccttggacccggcaacggactcgacaa |
| | | Virus 9 | gggggagccggtcaacgcagcagacgcggcggccctcgagcacgacaagg |
| | | comprising | cctacgaccagcagctcaaggccggagacaacccgtacctcaagtacaac |
| | | SEQ | cacgccgacgccgagttccaggagcggctcaaagaagatacgtcttttgg |
| | | ID NO: 5 | gggcaacctcgggcgagcagtcttccaggccaaaaagaggcttcttgaac |
| | | | ctcttggtctggttgaggaagcggctaagacggctcctggaaagaagagg |
| | | | cctgtagagcagtctcctcaggaaccggactcctccggggtattggcaaa |
| | | | tcgggtgcacagcccgctaaaaagagactcaatttcggtcagactggcga |
| | | | cacagagtcagtcccagaccctcaaccaatcggagaacctcccgcagccc |
| | | | cctcaggtgtgggatctcttacaatggcttcaggtggtggcgcaccagtg |
| | | | gcagacaataacgaaggtgccgatggagtgggtagttcctcgggaaattg |
| | | | gcattgcgattcccaatggctgggggacagagtcatcaccaccagcaccc |
| | | | gaacctgggccctgcccacctacaacaatcacctctacaagcaaatctcc |
| | | | aacagcacatctggaggatcttcaaatgacaacgcctacttcggctacag |
| | | | caccccctgggggtattttgacttcaacagattccactgccacttctcac |
| | | | cacgtgactggcagcgactcatcaacaacaactggggattccggcctaag |
| | | | cgactcaacttcaagctcttcaacattcaggtcaaagaggttacggacaa |
| | | | caatggagtcaagaccatcgccaataaccttaccagcacggtccaggtct |
| | | | tcacggactcagactatcagctcccgtacgtgctcgggtcggctcacgag |
| | | | ggctgcctcccgccgttcccagcggacgttttcatgattcctcagtacgg |
| | | | gtatctgacgcttaatgatggaagccaggccgtgggtcgttcgtcctttt |
| | | | actgcctggaatatttcccgtcgcaaatgctaagaacgggtaacaacttc |
| | | | cagttcagctacgagtttgagaacgtacctttccatagcagctacgctca |
| | | | cagccaaagcctggaccgactaatgaatccactcatcgaccaatacttgt |
| | | | actatctctcTaGAactattAACGGTTCTGGACAGAATCAAcaaacgcta |
| | | | aaattcagtgtggccggacccagcaacatggctgtccagggaagaaacta |
| | | | catacctggacccagctaccgacaacaacgtgtctcaaccactgtgactc |
| | | | aaaacaacaacagcgaatttgcttggcctggagcttcttcttgggctctc |
| | | | aatggacgtaatagcttgatgaatcctggacctgctatggccagccacaa |
| | | | agaaggagaggaccgtttctttcctttgtctggatctttaatttttggca |
| | | | aacaaggTacCggCagagacaacgtggatgcggacaaagtcatgataacc |
| | | | aacgaagaagaaattaaaactactaacccggtagcaacggagtcctatgg |
| | | | acaagtggccacaaaccaccagagtGCGCAACACAACTTTCCAAATGAAT |
| | | | TCGCTCAGGCACAGaccggttgggttcaaaaccaaggaatacttccgggt |
| | | | atggtttggcaggacagagatgtgtacctgcaaggacccatttgggccaa |
| | | | aattcctcacacggacggcaactttcacccttctccgctgatgggagggt |
| | | | ttggaatgaagcacccgcctcctcagatcctcatcaaaaacacacctgta |
| | | | cctgcggatcctccaacggccttcaacaaggacaagctgaactctttcat |
| | | | cacccagtattctactggccaagtcagcgtggagatcgagtgggagctgc |
| | | | agaaggaaaacagcaagcgctggaacccggagatccagtacacttccaac |
| | | | tattacaagtctaataatgttgaatttgctgttaatactgaaggtgtata |
| | | | tagtgaaccccgccccattggcaccagatacctgactcgtaatctg |
| 68 | DNA | Adeno- | atggctgccgatggttatcttccagattggctcgaggacaaccttagtga |
| | | Associated | aggaattcgcgagtggtgggctttgaaacctggagcccctcaacccaagg |
| | | Virus 9 | caaatcaacaacatcaagacaacgctcgaggtcttgtgcttccgggttac |
| | | comprising | aaataccttggacccggcaacggactcgacaagggggagccggtcaacgc |
| | | SEQ | agcagacgcggcggccctcgagcacgacaaggcctacgaccagcagctca |
| | | ID NO: 5 | aggccggagacaacccgtacctcaagtacaaccacgccgacgccgagttc |
| | | | caggagcggctcaaagaagatacgtcttttgggggcaacctcgggcgagc |
| | | | agtcttccaggccaaaaagaggcttcttgaacctcttggtctggttgagg |
| | | | aagcggctaagacggctcctggaaagaagaggcctgtagagcagtctcct |
| | | | caggaaccggactcctccgcgggtattggcaaatcgggtgcacagcccgc |
| | | | taaaaagagactcaatttcggtcagactggcgacacagagtcagtcccag |
| | | | accctcaaccaatcggagaacctcccgcagccccctcaggtgtgggatct |
| | | | cttacaatggcttcaggtggtggcgcaccagtggcagacaataacgaagg |
| | | | tgccgatggagtgggtagttcctcgggaaattggcattgcgattcccaat |
| | | | ggctgggggacagagtcatcaccaccagcacccgaacctgggccctgccc |
| | | | acctacaacaatcacctctacaagcaaatctccaacagcacatctggagg |
| | | | atcttcaaatgacaacgcctacttcggctacagcaccccctgggggtatt |
| | | | ttgacttcaacagattccactgccacttctcaccacgtgactggcagcga |
| | | | ctcatcaacaacaactggggattccggcctaagcgactcaacttcaagct |
| | | | cttcaacattcaggtcaaagaggttacggacaacaatggagtcaagacca |
| | | | tcgccaataaccttaccagcacggtccaggtcttcacggactcagactat |
| | | | cagctcccgtacgtgctcgggtcggctcacgagggctgcctcccgccgtt |
| | | | cccagcggacgttttcatgattcctcagtacgggtatctgacgcttaatg |
| | | | atggaagccaggccgtgggtcgttcgtccttttactgcctggaatatttc |
| | | | ccgtcgcaaatgctaagaacgggtaacaacttccagttcagctacgagtt |
| | | | tgagaacgtacctttccatagcagctacgctcacagccaaagcctggacc |
| | | | gactaatgaatccactcatcgaccaatacttgtactatctctcTaGAact |
| | | | attAACGGTTCTGGACAGAATCAAcaaacgctaaaattcagtgtggccgg |
| | | | acccagcaacatggctgtccagggaagaaactacatacctggacccagct |
| | | | accgacaacaacgtgtctcaaccactgtgactcaaaacaacaacagcgaa |
| | | | tttgcttggcctggagcttcttcttgggctctcaatggacgtaatagctt |
| | | | gatgaatcctggacctgctatggccagccacaaagaaggagaggaccgtt |
| | | | tctttcctttgtctggatctttaatttttggcaaacaaggTacCggCaga |
| | | | gacaacgtggatgcggacaaagtcatgataaccaacgaagaagaaattaa |
| | | | aactactaacccggtagcaacggagtcctatggacaagtggccacaaacc |
| | | | accagagtGCCCAGCATAACTTTCCGAATGAGTTTGCTCAGGCCCAAacc |
| | | | ggttgggttcaaaaccaaggaatacttccgggtatggtttggcaggacag |
| | | | agatgtgtacctgcaaggacccatttgggccaaaattcctcacacggacg |
| | | | gcaactttcacccttctccgctgatgggagggtttggaatgaagcacccg |
| | | | cctcctcagatcctcatcaaaaacacacctgtacctgcggatcctccaac |
| | | | ggccttcaacaaggacaagctgaactctttcatcacccagtattctactg |
| | | | gccaagtcagcgtggagatcgagtgggagctgcagaaggaaaacagcaag |
| | | | cgctggaacccggagatccagtacacttccaactattacaagtctaataa |
| | | | tgttgaatttgctgttaatactgaaggtgtatatagtgaaccccgcccca |
| | | | ttggcaccagatacctgactcgtaatctg |
| 69 | DNA | Adeno- | atggctgccgatggttatcttccagattggctcgaggacaaccttagtga |
| | | Associated | aggaattcgcgagtggtgggctttgaaacctggagcccctcaacccaagg |
| | | Virus 9 | caaatcaacaacatcaagacaacgctcgaggtcttgtgcttccgggttac |
| | | comprising | aaataccttggacccggcaacggactcgacaagggggagccggtcaacgc |
| | | SEQ | agcagacgcggcggccctcgagcacgacaaggcctacgaccagcagctca |
| | | ID NO: 5 | aggccggagacaacccgtacctcaagtacaaccacgccgacgccgagttc |
| | | | caggagcggctcaaagaagatacgtcttttgggggcaacctcgggcgagc |
| | | | agtcttccaggccaaaaagaggcttcttgaacctcttggtctggttgagg |
| | | | aagcggctaagacggctcctggaaagaagaggcctgtagagcagtctcct |
| | | | caggaaccggactcctccgcgggtattggcaaatcgggtgcacagcccgc |
| | | | taaaaagagactcaatttcggtcagactggcgacacagagtcagtcccag |
| | | | accctcaaccaatcggagaacctcccgcagccccctcaggtgtgggatct |
| | | | cttacaatggcttcaggtggtggcgcaccagtggcagacaataacgaagg |
| | | | tgccgatggagtgggtagttcctcgggaaattggcattgcgattcccaat |
| | | | ggctgggggacagagtcatcaccaccagcacccgaacctgggccctgccc |
| | | | acctacaacaatcacctctacaagcaaatctccaacagcacatctggagg |
| | | | atcttcaaatgacaacgcctacttcggctacagcaccccctgggggtatt |
| | | | ttgacttcaacagattccactgccacttctcaccacgtgactggcagcga |
| | | | ctcatcaacaacaactggggattccggcctaagcgactcaacttcaagct |
| | | | cttcaacattcaggtcaaagaggttacggacaacaatggagtcaagacca |
| | | | tcgccaataaccttaccagcacggtccaggtcttcacggactcagactat |
| | | | cagctcccgtacgtgctcgggtcggctcacgagggctgcctcccgccgtt |
| | | | cccagcggacgttttcatgattcctcagtacgggtatctgacgcttaatg |
| | | | atggaagccaggccgtgggtcgttcgtccttttactgcctggaatatttc |
| | | | ccgtcgcaaatgctaagaacgggtaacaacttccagttcagctacgagtt |
| | | | tgagaacgtacctttccatagcagctacgctcacagccaaagcctggacc |
| | | | gactaatgaatccactcatcgaccaatacttgtactatctctcTaGAact |
| | | | attAACGGTTCTGGACAGAATCAAcaaacgctaaaattcagtgtggccgg |
| | | | acccagcaacatggctgtccagggaagaaactacatacctggacccagct |
| | | | accgacaacaacgtgtctcaaccactgtgactcaaaacaacaacagcgaa |
| | | | tttgcttggcctggagcttcttcttgggctctcaatggacgtaatagctt |
| | | | gatgaatcctggacctgctatggccagccacaaagaaggagaggaccgtt |
| | | | tctttcctttgtctggatctttaatttttggcaaacaaggTacCggCaga |
| | | | gacaacgtggatgcggacaaagtcatgataaccaacgaagaagaaattaa |
| | | | aactactaacccggtagcaacggagtcctatggacaagtggccacaaacc |
| | | | accagagtGCCCAACATAACTTTCCGAACGAGTTCGCACAGGCCCAGacc |
| | | | ggttgggttcaaaaccaaggaatacttccgggtatggtttggcaggacag |
| | | | agatgtgtacctgcaaggacccatttgggccaaaattcctcacacggacg |
| | | | gcaactttcacccttctccgctgatgggagggtttggaatgaagcacccg |
| | | | cctcctcagatcctcatcaaaaacacacctgtacctgcggatcctccaac |
| | | | ggccttcaacaaggacaagctgaactctttcatcacccagtattctactg |
| | | | gccaagtcagcgtggagatcgagtgggagctgcagaaggaaaacagcaag |
| | | | cgctggaacccggagatccagtacacttccaactattacaagtctaataa |
| | | | tgttgaatttgctgttaatactgaaggtgtatatagtgaaccccgcccca |
| | | | ttggcaccagatacctgactcgtaatctg |
| 70 | DNA | Adeno- | atggctgccgatggttatcttccagattggctcgaggacaaccttagtga |
| | | Associated | aggaattcgcgagtggtgggctttgaaacctggagcccctcaacccaagg |
| | | Virus 9 | caaatcaacaacatcaagacaacgctcgaggtcttgtgcttccgggttac |
| | | comprising | aaataccttggacccggcaacggactcgacaagggggagccggtcaacgc |
| | | SEQ | agcagacgcggcggccctcgagcacgacaaggcctacgaccagcagctca |
| | | ID NO: 5 | aggccggagacaacccgtacctcaagtacaaccacgccgacgccgagttc |
| | | | caggagcggctcaaagaagatacgtcttttgggggcaacctcgggcgagc |
| | | | agtcttccaggccaaaaagaggcttcttgaacctcttggtctggttgagg |
| | | | aagcggctaagacggctcctggaaagaagaggcctgtagagcagtctcct |
| | | | caggaaccggactcctccgcgggtattggcaaatcgggtgcacagcccgc |
| | | | taaaaagagactcaatttcggtcagactggcgacacagagtcagtcccag |
| | | | accctcaaccaatcggagaacctcccgcagccccctcaggtgtgggatct |
| | | | cttacaatggcttcaggtggtggcgcaccagtggcagacaataacgaagg |
| | | | tgccgatggagtgggtagttcctcgggaaattggcattgcgattcccaat |
| | | | ggctgggggacagagtcatcaccaccagcacccgaacctgggccctgccc |
| | | | acctacaacaatcacctctacaagcaaatctccaacagcacatctggagg |
| | | | atcttcaaatgacaacgcctacttcggctacagcaccccctgggggtatt |
| | | | ttgacttcaacagattccactgccacttctcaccacgtgactggcagcga |
| | | | ctcatcaacaacaactggggattccggcctaagcgactcaacttcaagct |
| | | | cttcaacattcaggtcaaagaggttacggacaacaatggagtcaagacca |
| | | | tcgccaataaccttaccagcacggtccaggtcttcacggactcagactat |
| | | | cagctcccgtacgtgctcgggtcggctcacgagggctgcctcccgccgtt |
| | | | cccagcggacgttttcatgattcctcagtacgggtatctgacgcttaatg |
| | | | atggaagccaggccgtgggtcgttcgtccttttactgcctggaatatttc |
| | | | ccgtgcaaatgctaagaacgggtaacaacttccagttcagctacgagttt |
| | | | gagaacgtacctttccatagcagctacgctcacagccaaagcctggaccg |
| | | | actaatgaatccactcatcgaccaatacttgtactatctctcTaGAacta |
| | | | ttAACGGTTCTGGACAGAATCAAcaaacgctaaaattcagtgtggccgga |
| | | | cccagcaacatggctgtccagggaagaaactacatacctggacccagcta |
| | | | ccgacaacaacgtgtctcaaccactgtgactcaaaacaacaacagcgaat |
| | | | ttgcttggcctggagcttcttcttgggctctcaatggacgtaatagcttg |
| | | | atgaatcctggacctgctatggccagccacaaagaaggagaggaccgttt |
| | | | ctttcctttgtctggatctttaatttttggcaaacaaggTacCggCagag |
| | | | acaacgtggatgcggacaaagtcatgataaccaacgaagaagaaattaaa |
| | | | actactaacccggtagcaacggagtcctatggacaagtggccacaaacca |
| | | | ccagagtGCGCAACACAATTTCCCGAATGAGTTTGCGCAAGCGCAAaccg |
| | | | gttgggttcaaaaccaaggaatacttccgggtatggtttggcaggacaga |
| | | | gatgtgtacctgcaaggacccatttgggccaaaattcctcacacggacgg |
| | | | caactttcacccttctccgctgatgggagggtttggaatgaagcacccgc |
| | | | ctcctcagatcctcatcaaaaacacacctgtacctgcggatcctccaacg |
| | | | gccttcaacaaggacaagctgaactctttcatcacccagtattctactgg |
| | | | ccaagtcagcgtggagatcgagtgggagctgcagaaggaaaacagcaagc |
| | | | gctggaacccggagatccagtacacttccaactattacaagtctaataat |
| | | | gttgaatttgctgttaatactgaaggtgtatatagtgaaccccgccccat |
| | | | tggcaccagatacctgactcgtaatctg |
| 71 | DNA | Adeno- | atggctgccgatggttatcttccagattggctcgaggacaaccttagtga |
| | | Associated | aggaattcgcgagtggtgggctttgaaacctggagcccctcaacccaagg |
| | | Virus 9 | caaatcaacaacatcaagacaacgctcgaggtcttgtgcttccgggttac |
| | | comprising | aaataccttggacccggcaacggactcgacaagggggagccggtcaacgc |
| | | SEQ | agcagacgcggcggccctcgagcacgacaaggcctacgaccagcagctca |
| | | ID NO: 6 | aggccggagacaacccgtacctcaagtacaaccacgccgacgccgagttc |
| | | | caggagcggctcaaagaagatacgtcttttgggggcaacctcgggcgagc |
| | | | agtcttccaggccaaaaagaggcttcttgaacctcttggtctggttgagg |
| | | | aagcggctaagacggctcctggaaagaagaggcctgtagagcagtctcct |
| | | | caggaaccggactcctccgcgggtattggcaaatcgggtgcacagcccgc |
| | | | taaaaagagactcaatttcggtcagactggcgacacagagtcagtcccag |
| | | | accctcaaccaatcggagaacctcccgcagccccctcaggtgtgggatct |
| | | | cttacaatggcttcaggtggtggcgcaccagtggcagacaataacgaagg |
| | | | tgccgatggagtgggtagttcctcgggaaattggcattgcgattcccaat |
| | | | ggctgggggacagagtcatcaccaccagcacccgaacctgggccctgccc |
| | | | acctacaacaatcacctctacaagcaaatctccaacagcacatctggagg |
| | | | atcttcaaatgacaacgcctacttcggctacagcaccccctgggggtatt |
| | | | ttgacttcaacagattccactgccacttctcaccacgtgactggcagcga |
| | | | ctcatcaacaacaactggggattccggcctaagcgactcaacttcaagct |
| | | | cttcaacattcaggtcaaagaggttacggacaacaatggagtcaagacca |
| | | | tcgccaataaccttaccagcacggtccaggtcttcacggactcagactat |
| | | | cagctcccgtacgtgctcgggtcggctcacgagggctgcctcccgccgtt |
| | | | cccagcggacgttttcatgattcctcagtacgggtatctgacgcttaatg |
| | | | atggaagccaggccgtgggtcgttcgtccttttactgcctggaatatttc |
| | | | ccgtcgcaaatgctaagaacgggtaacaacttccagttcagctacgagtt |
| | | | tgagaacgtacctttccatagcagctacgctcacagccaaagcctggacc |
| | | | gactaatgaatccactcatcgaccaatacttgtactatctctcTaGAact |
| | | | attAACGGTTCTGGACAGAATCAAcaaacgctaaaattcagtgtggccgg |
| | | | acccagcaacatggctgtccagggaagaaactacatacctggacccagct |
| | | | accgacaacaacgtgtctcaaccactgtgactcaaaacaacaacagcgaa |
| | | | tttgcttggcctggagcttcttcttgggctctcaatggacgtaatagctt |
| | | | gatgaatcctggacctgctatggccagccacaaagaaggagaggaccgtt |
| | | | tctttcctttgtctggatctttaatttttggcaaacaaggTacCggCaga |
| | | | gacaacgtggatgcggacaaagtcatgataaccaacgaagaagaaattaa |
| | | | aactactaacccggtagcaacggagtcctatggacaagtggccacaaacc |
| | | | accagagtGCACAGATACGTATGCCTACGGAGTTTGCGCAAGCTCAGacc |
| | | | ggttgggttcaaaaccaaggaatacttccgggtatggtttggcaggacag |
| | | | agatgtgtacctgcaaggacccatttgggccaaaattcctcacacggacg |
| | | | gcaactttcacccttctccgctgatgggagggtttggaatgaagcacccg |
| | | | cctcctcagatcctcatcaaaaacacacctgtacctgcggatcctccaac |
| | | | ggccttcaacaaggacaagctgaactctttcatcacccagtattctactg |
| | | | gccaagtcagcgtggagatcgagtgggagctgcagaaggaaaacagcaag |
| | | | cgctggaacccggagatccagtacacttccaactattacaagtctaataa |
| | | | tgttgaatttgctgttaatactgaaggtgtatatagtgaaccccgcccca |
| | | | ttggcaccagatacctgactcgtaatctg |
| 72 | DNA | Adeno- | atggctgccgatggttatcttccagattggctcgaggacaaccttagtga |
| | | Associated | aggaattcgcgagtggtgggctttgaaacctggagcccctcaacccaagg |
| | | Virus 9 | caaatcaacaacatcaagacaacgctcgaggtcttgtgcttccgggttac |
| | | comprising | aaataccttggacccggcaacggactcgacaagggggagccggtcaacgc |
| | | SEQ | agcagacgcggcggccctcgagcacgacaaggcctacgaccagcagctca |
| | | ID NO: 6 | aggccggagacaacccgtacctcaagtacaaccacgccgacgccgagttc |
| | | | caggagcggctcaaagaagatacgtcttttgggggcaacctcgggcgagc |
| | | | agtcttccaggccaaaaagaggcttcttgaacctcttggtctggttgagg |
| | | | aagcggctaagacggctcctggaaagaagaggcctgtagagcagtctcct |
| | | | caggaaccggactcctccgcgggtattggcaaatcgggtgcacagcccgc |
| | | | taaaaagagactcaatttcggtcagactggcgacacagagtcagtcccag |
| | | | accctcaaccaatcggagaacctcccgcagccccctcaggtgtgggatct |
| | | | cttacaatggcttcaggtggtggcgcaccagtggcagacaataacgaagg |
| | | | tgccgatggagtgggtagttcctcgggaaattggcattgcgattcccaat |
| | | | ggctgggggacagagtcatcaccaccagcacccgaacctgggccctgccc |
| | | | acctacaacaatcacctctacaagcaaatctccaacagcacatctggagg |
| | | | atcttcaaatgacaacgcctacttcggctacagcaccccctgggggtatt |
| | | | ttgacttcaacagattccactgccacttctcaccacgtgactggcagcga |
| | | | ctcatcaacaacaactggggattccggcctaagcgactcaacttcaagct |
| | | | cttcaacattcaggtcaaagaggttacggacaacaatggagtcaagacca |
| | | | tcgccaataaccttaccagcacggtccaggtcttcacggactcagactat |
| | | | cagctcccgtacgtgctcgggtcggctcacgagggctgcctcccgccgtt |
| | | | cccagcggacgttttcatgattcctcagtacgggtatctgacgcttaatg |
| | | | atggaagccaggccgtgggtcgttcgtccttttactgcctggaatatttc |
| | | | ccgtcgcaaatgctaagaacgggtaacaacttccagttcagctacgagtt |
| | | | tgagaacgtacctttccatagcagctacgctcacagccaaagcctggacc |
| | | | gactaatgaatccactcatcgaccaatacttgtactatctctcTaGAact |
| | | | attAACGGTTCTGGACAGAATCAAcaaacgctaaaattcagtgtggccgg |
| | | | acccagcaacatggctgtccagggaagaaactacatacctggacccagct |
| | | | accgacaacaacgtgtctcaaccactgtgactcaaaacaacaacagcgaa |
| | | | tttgcttggcctggagcttcttcttgggctctcaatggacgtaatagctt |
| | | | gatgaatcctggacctgctatggccagccacaaagaaggagaggaccgtt |
| | | | tctttcctttgtctggatctttaatttttggcaaacaaggTacCggCaga |
| | | | gacaacgtggatgcggacaaagtcatgataaccaacgaagaagaaattaa |
| | | | aactactaacccggtagcaacggagtcctatggacaagtggccacaaacc |
| | | | accagagtGCTCAGATAAGGATGCCCACGGAGTTTGCACAGGCGCAGacc |
| | | | ggttgggttcaaaaccaaggaatacttccgggtatggtttggcaggacag |
| | | | agatgtgtacctgcaaggacccatttgggccaaaattcctcacacggacg |
| | | | gcaactttcacccttctccgctgatgggagggtttggaatgaagcacccg |
| | | | cctcctcagatcctcatcaaaaacacacctgtacctgcggatcctccaac |
| | | | ggccttcaacaaggacaagctgaactctttcatcacccagtattctactg |
| | | | gccaagtcagcgtggagatcgagtgggagctgcagaaggaaaacagcaag |
| | | | cgctggaacccggagatccagtacacttccaactattacaagtctaataa |
| | | | tgttgaatttgctgttaatactgaaggtgtatatagtgaaccccgcccca |
| | | | ttggcaccagatacctgactcgtaatctg |
| 73 | DNA | Adeno- | atggctgccgatggttatcttccagattggctcgaggacaaccttagtga |
| | | Associated | aggaattcgcgagtggtgggctttgaaacctggagcccctcaacccaagg |
| | | Virus 9 | caaatcaacaacatcaagacaacgctcgaggtcttgtgcttccgggttac |
| | | comprising | aaataccttggacccggcaacggactcgacaagggggagccggtcaacgc |
| | | SEQ | agcagacgcggcggccctcgagcacgacaaggcctacgaccagcagctca |
| | | ID NO: 6 | aggccggagacaacccgtacctcaagtacaaccacgccgacgccgagttc |
| | | | caggagcggctcaaagaagatacgtcttttgggggcaacctcgggcgagc |
| | | | agtcttccaggccaaaaagaggcttcttgaacctcttggtctggttgagg |
| | | | aagcggctaagacggctcctggaaagaagaggcctgtagagcagtctcct |
| | | | caggaaccggactcctccgcgggtattggcaaatcgggtgcacagcccgc |
| | | | taaaaagagactcaatttcggtcagactggcgacacagagtcagtcccag |
| | | | accctcaaccaatcggagaacctcccgcagccccctcaggtgtgggatct |
| | | | cttacaatggcttcaggtggtggcgcaccagtggcagacaataacgaagg |
| | | | tgccgatggagtgggtagttcctcgggaaattggcattgcgattcccaat |
| | | | ggctgggggacagagtcatcaccaccagcacccgaacctgggccctgccc |
| | | | acctacaacaatcacctctacaagcaaatctccaacagcacatctggagg |
| | | | atcttcaaatgacaacgcctacttcggctacagcaccccctgggggtatt |
| | | | ttgacttcaacagattccactgccacttctcaccacgtgactggcagcga |
| | | | ctcatcaacaacaactggggattccggcctaagcgactcaacttcaagct |
| | | | cttcaacattcaggtcaaagaggttacggacaacaatggagtcaagacca |
| | | | tcgccaataaccttaccagcacggtccaggtcttcacggactcagactat |
| | | | cagctcccgtacgtgctcgggtcggctcacgagggctgcctcccgccgtt |
| | | | cccagcggacgttttcatgattcctcagtacgggtatctgacgcttaatg |
| | | | atggaagccaggccgtgggtcgttcgtccttttactgcctggaatatttc |
| | | | ccgtcgcaaatgctaagaacgggtaacaacttccagttcagctacgagtt |
| | | | tgagaacgtacctttccatagcagctacgctcacagccaaagcctggacc |
| | | | gactaatgaatccactcatcgaccaatacttgtactatctctcTaGAact |
| | | | attAACGGTTCTGGACAGAATCAAcaaacgctaaaattcagtgtggccgg |
| | | | acccagcaacatggctgtccagggaagaaactacatacctggacccagct |
| | | | accgacaacaacgtgtctcaaccactgtgactcaaaacaacaacagcgaa |
| | | | tttgcttggcctggagcttcttcttgggctctcaatggacgtaatagctt |
| | | | gatgaatcctggacctgctatggccagccacaaagaaggagaggaccgtt |
| | | | tctttcctttgtctggatctttaatttttggcaaacaaggTacCggCaga |
| | | | gacaacgtggatgcggacaaagtcatgataaccaacgaagaagaaattaa |
| | | | aactactaacccggtagcaacggagtcctatggacaagtggccacaaacc |
| | | | accagagtGCGCAAATTCGGATGCCTACGGAATTCGCGCAAGCTCAGacc |
| | | | ggttgggttcaaaaccaaggaatacttccgggtatggtttggcaggacag |
| | | | agatgtgtacctgcaaggacccatttgggccaaaattcctcacacggacg |
| | | | gcaactttcacccttctccgctgatgggagggtttggaatgaagcacccg |
| | | | cctcctcagatcctcatcaaaaacacacctgtacctgcggatcctccaac |
| | | | ggccttcaacaaggacaagctgaactctttcatcacccagtattctactg |
| | | | gccaagtcagcgtggagatcgagtgggagctgcagaaggaaaacagcaag |
| | | | cgctggaacccggagatccagtacacttccaactattacaagtctaataa |
| | | | tgttgaatttgctgttaatactgaaggtgtatatagtgaaccccgcccca |
| | | | ttggcaccagatacctgactcgtaatctg |
| 74 | DNA | Adeno- | atggctgccgatggttatcttccagattggctcgaggacaaccttagtga |
| | | Associated | aggaattcgcgagtggtgggctttgaaacctggagcccctcaacccaagg |
| | | Virus 9 | caaatcaacaacatcaagacaacgctcgaggtcttgtgcttccgggttac |
| | | comprising | aaataccttggacccggcaacggactcgacaagggggagccggtcaacgc |
| | | SEQ | agcagacgcggcggccctcgagcacgacaaggcctacgaccagcagctca |
| | | ID NO: 6 | aggccggagacaacccgtacctcaagtacaaccacgccgacgccgagttc |
| | | | caggagcggctcaaagaagatacgtcttttgggggcaacctcgggcgagc |
| | | | agtcttccaggccaaaaagaggcttcttgaacctcttggtctggttgagg |
| | | | aagcggctaagacggctcctggaaagaagaggcctgtagagcagtctcct |
| | | | caggaaccggactcctccgcgggtattggcaaatcgggtgcacagcccgc |
| | | | taaaaagagactcaatttcggtcagactggcgacacagagtcagtcccag |
| | | | accctcaaccaatcggagaacctcccgcagccccctcaggtgtgggatct |
| | | | cttacaatggcttcaggtggtggcgcaccagtggcagacaataacgaagg |
| | | | tgccgatggagtgggtagttcctcgggaaattggcattgcgattcccaat |
| | | | ggctgggggacagagtcatcaccaccagcacccgaacctgggccctgccc |
| | | | acctacaacaatcacctctacaagcaaatctccaacagcacatctggagg |
| | | | atcttcaaatgacaacgcctacttcggctacagcaccccctgggggtatt |
| | | | ttgacttcaacagattccactgccacttctcaccacgtgactggcagcga |
| | | | ctcatcaacaacaactggggattccggcctaagcgactcaacttcaagct |
| | | | cttcaacattcaggtcaaagaggttacggacaacaatggagtcaagacca |
| | | | tcgccaataaccttaccagcacggtccaggtcttcacggactcagactat |
| | | | cagctcccgtacgtgctcgggtcggctcacgagggctgcctcccgccgtt |
| | | | cccagcggacgttttcatgattcctcagtacgggtatctgacgcttaatg |
| | | | atggaagccaggccgtgggtcgttcgtccttttactgcctggaatatttc |
| | | | ccgtcgcaaatgctaagaacgggtaacaacttccagttcagctacgagtt |
| | | | tgagaacgtacctttccatagcagctacgctcacagccaaagcctggacc |
| | | | gactaatgaatccactcatcgaccaatacttgtactatctctcTaGAact |
| | | | attAACGGTTCTGGACAGAATCAAcaaacgctaaaattcagtgtggccgg |
| | | | acccagcaacatggctgtccagggaagaaactacatacctggacccagct |
| | | | accgacaacaacgtgtctcaaccactgtgactcaaaacaacaacagcgaa |
| | | | tttgcttggcctggagcttcttcttgggctctcaatggacgtaatagctt |
| | | | gatgaatcctggacctgctatggccagccacaaagaaggagaggaccgtt |
| | | | tctttcctttgtctggatctttaatttttggcaaacaaggTacCggCaga |
| | | | gacaacgtggatgcggacaaagtcatgataaccaacgaagaagaaattaa |
| | | | aactactaacccggtagcaacggagtcctatggacaagtggccacaaacc |
| | | | accagagtGCCCAGATTAGAATGCCGACGGAGTTCGCACAAGCACAGacc |
| | | | ggttgggttcaaaaccaaggaatacttccgggtatggtttggcaggacag |
| | | | agatgtgtacctgcaaggacccatttgggccaaaattcctcacacggacg |
| | | | gcaactttcacccttctccgctgatgggagggtttggaatgaagcacccg |
| | | | cctcctcagatcctcatcaaaaacacacctgtacctgcggatcctccaac |
| | | | ggccttcaacaaggacaagctgaactctttcatcacccagtattctactg |
| | | | gccaagtcagcgtggagatcgagtgggagctgcagaaggaaaacagcaag |
| | | | cgctggaacccggagatccagtacacttccaactattacaagtctaataa |
| | | | tgttgaatttgctgttaatactgaaggtgtatatagtgaaccccgcccca |
| | | | ttggcaccagatacctgactcgtaatctg |
| 75 | DNA | Adeno- | atggctgccgatggttatcttccagattggctcgaggacaaccttagtga |
| | | Associated | aggaattcgcgagtggtgggctttgaaacctggagcccctcaacccaagg |
| | | Virus 9 | caaatcaacaacatcaagacaacgctcgaggtcttgtgcttccgggttac |
| | | comprising | aaataccttggacccggcaacggactcgacaagggggagccggtcaacgc |
| | | SEQ | agcagacgcggcggccctcgagcacgacaaggcctacgaccagcagctca |
| | | ID NO: 6 | aggccggagacaacccgtacctcaagtacaaccacgccgacgccgagttc |
| | | | caggagcggctcaaagaagatacgtcttttgggggcaacctcgggcgagc |
| | | | agtcttccaggccaaaaagaggcttcttgaacctcttggtctggttgagg |
| | | | aagcggctaagacggctcctggaaagaagaggcctgtagagcagtctcct |
| | | | caggaaccggactcctccgcgggtattggcaaatcgggtgcacagcccgc |
| | | | taaaaagagactcaatttcggtcagactggcgacacagagtcagtcccag |
| | | | accctcaaccaatcggagaacctcccgcagccccctcaggtgtgggatct |
| | | | cttacaatggcttcaggtggtggcgcaccagtggcagacaataacgaagg |
| | | | tgccgatggagtgggtagttcctcgggaaattggcattgcgattcccaat |
| | | | ggctgggggacagagtcatcaccaccagcacccgaacctgggccctgccc |
| | | | acctacaacaatcacctctacaagcaaatctccaacagcacatctggagg |
| | | | atcttcaaatgacaacgcctacttcggctacagcaccccctgggggtatt |
| | | | ttgacttcaacagattccactgccacttctcaccacgtgactggcagcga |
| | | | ctcatcaacaacaactggggattccggcctaagcgactcaacttcaagct |
| | | | cttcaacattcaggtcaaagaggttacggacaacaatggagtcaagacca |
| | | | tcgccaataaccttaccagcacggtccaggtcttcacggactcagactat |
| | | | cagctcccgtacgtgctcgggtcggctcacgagggctgcctcccgccgtt |
| | | | cccagcggacgttttcatgattcctcagtacgggtatctgacgcttaatg |
| | | | atggaagccaggccgtgggtcgttcgtccttttactgcctggaatatttc |
| | | | ccgtcgcaaatgctaagaacgggtaacaacttccagttcagctacgagtt |
| | | | tgagaacgtacctttccatagcagctacgctcacagccaaagcctggacc |
| | | | gactaatgaatccactcatcgaccaatacttgtactatctctcTaGAact |
| | | | attAACGGTTCTGGACAGAATCAAcaaacgctaaaattcagtgtggccgg |
| | | | acccagcaacatggctgtccagggaagaaactacatacctggacccagct |
| | | | accgacaacaacgtgtctcaaccactgtgactcaaaacaacaacagcgaa |
| | | | tttgcttggcctggagcttcttcttgggctctcaatggacgtaatagctt |
| | | | gatgaatcctggacctgctatggccagccacaaagaaggagaggaccgtt |
| | | | tctttcctttgtctggatctttaatttttggcaaacaaggTacCggCaga |
| | | | gacaacgtggatgcggacaaagtcatgataaccaacgaagaagaaattaa |
| | | | aactactaacccggtagcaacggagtcctatggacaagtggccacaaacc |
| | | | accagagtGCCCAAATCAGGATGCCAACCGAATTCGCCCAGGCACAAacc |
| | | | ggttgggttcaaaaccaaggaatacttccgggtatggtttggcaggacag |
| | | | agatgtgtacctgcaaggacccatttgggccaaaattcctcacacggacg |
| | | | gcaactttcacccttctccgctgatgggagggtttggaatgaagcacccg |
| | | | cctcctcagatcctcatcaaaaacacacctgtacctgcggatcctccaac |
| | | | ggccttcaacaaggacaagctgaactctttcatcacccagtattctactg |
| | | | gccaagtcagcgtggagatcgagtgggagctgcagaaggaaaacagcaag |
| | | | cgctggaacccggagatccagtacacttccaactattacaagtctaataa |
| | | | tgttgaatttgctgttaatactgaaggtgtatatagtgaaccccgcccca |
| | | | ttggcaccagatacctgactcgtaatctg |
| 76 | DNA | Adeno- | atggctgccgatggttatcttccagattggctcgaggacaaccttagtga |
| | | Associated | aggaattcgcgagtggtgggctttgaaacctggagcccctcaacccaagg |
| | | Virus 9 | caaatcaacaacatcaagacaacgctcgaggtcttgtgcttccgggttac |
| | | comprising | aaataccttggacccggcaacggactcgacaagggggagccggtcaacgc |
| | | SEQ | agcagacgcggcggccctcgagcacgacaaggcctacgaccagcagctca |
| | | ID NO: 6 | aggccggagacaacccgtacctcaagtacaaccacgccgacgccgagttc |
| | | | caggagcggctcaaagaagatacgtcttttgggggcaacctcgggcgagc |
| | | | agtcttccaggccaaaaagaggcttcttgaacctcttggtctggttgagg |
| | | | aagcggctaagacggctcctggaaagaagaggcctgtagagcagtctcct |
| | | | caggaaccggactcctccgcgggtattggcaaatcgggtgcacagcccgc |
| | | | taaaaagagactcaatttcggtcagactggcgacacagagtcagtcccag |
| | | | accctcaaccaatcggagaacctcccgcagccccctaggtgtgggatctc |
| | | | ttacaatggcttcaggtggtggcgcaccagtggcagacaataacgaaggt |
| | | | gccgatggagtgggtagttcctcgggaaattggcattgcgattcccaatg |
| | | | gctgggggacagagtcatcaccaccagcacccgaacctgggccctgccca |
| | | | cctacaacaatcacctctacaagcaaatctccaacagcacatctggagga |
| | | | tcttcaaatgacaacgcctacttcggctacagcaccccctgggggtattt |
| | | | tgacttcaacagattccactgccacttctcaccacgtgactggcagcgac |
| | | | tcatcaacaacaactggggattccggcctaagcgactcaacttcaagctc |
| | | | ttcaacattcaggtcaaagaggttacggacaacaatggagtcaagaccat |
| | | | cgccaataaccttaccagcacggtccaggtcttcacggactcagactatc |
| | | | agctcccgtacgtgctcgggtcggctcacgagggctgcctcccgccgttc |
| | | | ccagcggacgttttcatgattcctcagtacgggtatctgacgcttaatga |
| | | | tggaagccaggccgtgggtcgttcgtccttttactgcctggaatatttcc |
| | | | cgtcgcaaatgctaagaacgggtaacaacttccagttcagctacgagttt |
| | | | gagaacgtacctttccatagcagctacgctcacagccaaagcctggaccg |
| | | | actaatgaatccactcatcgaccaatacttgtactatctctcTaGAacta |
| | | | ttAACGGTTCTGGACAGAATCAAcaaacgctaaaattcagtgtggccgga |
| | | | cccagcaacatggctgtccagggaagaaactacatacctggacccagcta |
| | | | ccgacaacaacgtgtctcaaccactgtgactcaaaacaacaacagcgaat |
| | | | ttgcttggcctggagcttcttcttgggctctcaatggacgtaatagcttg |
| | | | atgaatcctggacctgctatggccagccacaaagaaggagaggaccgttt |
| | | | ctttcctttgtctggatctttaatttttggcaaacaaggTacCggCagag |
| | | | acaacgtggatgcggacaaagtcatgataaccaacgaagaagaaattaaa |
| | | | actactaacccggtagcaacggagtcctatggacaagtggccacaaacca |
| | | | ccagagtGCACAAATCAGGATGCCGACGGAATTCGCGCAGGCTCAAaccg |
| | | | gttgggttcaaaaccaaggaatacttccgggtatggtttggcaggacaga |
| | | | gatgtgtacctgcaaggacccatttgggccaaaattcctcacacggacgg |
| | | | caactttcacccttctccgctgatgggagggtttggaatgaagcacccgc |
| | | | ctcctcagatcctcatcaaaaacacacctgtacctgcggatcctccaacg |
| | | | gccttcaacaaggacaagctgaactctttcatcacccagtattctactgg |
| | | | ccaagtcagcgtggagatcgagtgggagctgcagaaggaaaacagcaagc |
| | | | gctggaacccggagatccagtacacttccaactattacaagtctaataat |
| | | | gttgaatttgctgttaatactgaaggtgtatatagtgaaccccgccccat |
| | | | tggcaccagatacctgactcgtaatctg |
| 77 | DNA | Adeno- | atggctgccgatggttatcttccagattggctcgaggacaaccttagtga |
| | | Associated | aggaattcgcgagtggtgggctttgaaacctggagcccctcaacccaagg |
| | | Virus 9 | caaatcaacaacatcaagacaacgctcgaggtcttgtgcttccgggttac |
| | | comprising | aaataccttggacccggcaacggactcgacaagggggagccggtcaacgc |
| | | SEQ | agcagacgcggcggccctcgagcacgacaaggcctacgaccagcagctca |
| | | ID NO: 6 | aggccggagacaacccgtacctcaagtacaaccacgccgacgccgagttc |
| | | | caggagcggctcaaagaagatacgtcttttgggggcaacctcgggcgagc |
| | | | agtcttccaggccaaaaagaggcttcttgaacctcttggtctggttgagg |
| | | | aagcggctaagacggctcctggaaagaagaggcctgtagagcagtctcct |
| | | | caggaaccggactcctccgcgggtattggcaaatcgggtgcacagcccgc |
| | | | taaaaagagactcaatttcggtcagactggcgacacagagtcagtcccag |
| | | | accctcaaccaatcggagaacctcccgcagccccctcaggtgtgggatct |
| | | | cttacaatggcttcaggtggtggcgcaccagtggcagacaataacgaagg |
| | | | tgccgatggagtgggtagttcctcgggaaattggcattgcgattcccaat |
| | | | ggctgggggacagagtcatcaccaccagcacccgaacctgggccctgccc |
| | | | acctacaacaatcacctctacaagcaaatctccaacagcacatctggagg |
| | | | atcttcaaatgacaacgcctacttcggctacagcaccccctgggggtatt |
| | | | ttgacttcaacagattccactgccacttctcaccacgtgactggcagcga |
| | | | ctcatcaacaacaactggggattccggcctaagcgactcaacttcaagct |
| | | | cttcaacattcaggtcaaagaggttacggacaacaatggagtcaagacca |
| | | | tcgccaataaccttaccagcacggtccaggtcttcacggactcagactat |
| | | | cagctcccgtacgtgctcgggtcggctcacgagggctgcctcccgccgtt |
| | | | cccagcggacgttttcatgattcctcagtacgggtatctgacgcttaatg |
| | | | atggaagccaggccgtgggtcgttcgtccttttactgcctggaatatttc |
| | | | ccgtcgcaaatgctaagaacgggtaacaacttccagttcagctacgagtt |
| | | | tgagaacgtacctttccatagcagctacgctcacagccaaagcctggacc |
| | | | gactaatgaatccactcatcgaccaatacttgtactatctctcTaGAact |
| | | | attAACGGTTCTGGACAGAATCAAcaaacgctaaaattcagtgtggccgg |
| | | | acccagcaacatggctgtccagggaagaaactacatacctggacccagct |
| | | | accgacaacaacgtgtctcaaccactgtgactcaaaacaacaacagcgaa |
| | | | tttgcttggcctggagcttcttcttgggctctcaatggacgtaatagctt |
| | | | gatgaatcctggacctgctatggccagccacaaagaaggagaggaccgtt |
| | | | tctttcctttgtctggatctttaatttttggcaaacaaggTacCggCaga |
| | | | gacaacgtggatgcggacaaagtcatgataaccaacgaagaagaaattaa |
| | | | aactactaacccggtagcaacggagtcctatggacaagtggccacaaacc |
| | | | accagagtGCCCAAATCCGTATGCCGACCGAATTCGCGCAAGCCCAAacc |
| | | | ggttgggttcaaaaccaaggaatacttccgggtatggtttggcaggacag |
| | | | agatgtgtacctgcaaggacccatttgggccaaaattcctcacacggacg |
| | | | gcaactttcacccttctccgctgatgggagggtttggaatgaagcacccg |
| | | | cctcctcagatcctcatcaaaaacacacctgtacctgcggatcctccaac |
| | | | ggccttcaacaaggacaagctgaactctttcatcacccagtattctactg |
| | | | gccaagtcagcgtggagatcgagtgggagctgcagaaggaaaacagcaag |
| | | | cgctggaacccggagatccagtacacttccaactattacaagtctaataa |
| | | | tgttgaatttgctgttaatactgaaggtgtatatagtgaaccccgcccca |
| | | | ttggcaccagatacctgactcgtaatctg |
| 78 | DNA | Adeno- | atggctgccgatggttatcttccagattggctcgaggacaaccttagtga |
| | | Associated | aggaattcgcgagtggtgggctttgaaacctggagcccctcaacccaagg |
| | | Virus 9 | caaatcaacaacatcaagacaacgctcgaggtcttgtgcttccgggttac |
| | | comprising | aaataccttggacccggcaacggactcgacaagggggagccggtcaacgc |
| | | SEQ | agcagacgcggcggccctcgagcacgacaaggcctacgaccagcagctca |
| | | ID NO: 6 | aggccggagacaacccgtacctcaagtacaaccacgccgacgccgagttc |
| | | | caggagcggctcaaagaagatacgtcttttgggggcaacctcgggcgagc |
| | | | agtcttccaggccaaaaagaggcttcttgaacctcttggtctggttgagg |
| | | | aagcggctaagacggctcctggaaagaagaggcctgtagagcagtctcct |
| | | | caggaaccggactcctccgcgggtattggcaaatcgggtgcacagcccgc |
| | | | taaaaagagactcaatttcggtcagactggcgacacagagtcagtcccag |
| | | | accctcaaccaatcggagaacctcccgcagccccctcaggtgtgggatct |
| | | | cttacaatggcttcaggtggtggcgcaccagtggcagacaataacgaagg |
| | | | tgccgatggagtgggtagttcctcgggaaattggcattgcgattcccaat |
| | | | ggctgggggacagagtcatcaccaccagcacccgaacctgggccctgccc |
| | | | acctacaacaatcacctctacaagcaaatctccaacagcacatctggagg |
| | | | atcttcaaatgacaacgcctacttcggctacagcaccccctgggggtatt |
| | | | ttgacttcaacagattccactgccacttctcaccacgtgactggcagcga |
| | | | ctcatcaacaacaactggggattccggcctaagcgactcaacttcaagct |
| | | | cttcaacattcaggtcaaagaggttacggacaacaatggagtcaagacca |
| | | | tcgccaataaccttaccagcacggtccaggtcttcacggactcagactat |
| | | | cagctcccgtacgtgctcgggtcggctcacgagggctgcctcccgccgtt |
| | | | cccagcggacgttttcatgattcctcagtacgggtatctgacgcttaatg |
| | | | atggaagccaggccgtgggtcgttcgtccttttactgcctggaatatttc |
| | | | ccgtcgcaaatgctaagaacgggtaacaacttccagttcagctacgagtt |
| | | | tgagaacgtacctttccatagcagctacgctcacagccaaagcctggacc |
| | | | gactaatgaatccactcatcgaccaatacttgtactatctctcTaGAact |
| | | | attAACGGTTCTGGACAGAATCAAcaaacgctaaaattcagtgtggccgg |
| | | | acccagcaacatggctgtccagggaagaaactacatacctggacccagct |
| | | | accgacaacaacgtgtctcaaccactgtgactcaaaacaacaacagcgaa |
| | | | tttgcttggcctggagcttcttcttgggctctcaatggacgtaatagctt |
| | | | gatgaatcctggacctgctatggccagccacaaagaaggagaggaccgtt |
| | | | tctttcctttgtctggatctttaatttttggcaaacaaggTacCggCaga |
| | | | gacaacgtggatgcggacaaagtcatgataaccaacgaagaagaaattaa |
| | | | aactactaacccggtagcaacggagtcctatggacaagtggccacaaacc |
| | | | accagagtGCTCAGATCCGAATGCCCACAGAGTTTGCTCAGGCACAAacc |
| | | | ggttgggttcaaaaccaaggaatacttccgggtatggtttggcaggacag |
| | | | agatgtgtacctgcaaggacccatttgggccaaaattcctcacacggacg |
| | | | gcaactttcacccttctccgctgatgggagggtttggaatgaagcacccg |
| | | | cctcctcagatcctcatcaaaaacacacctgtacctgcggatcctccaac |
| | | | ggccttcaacaaggacaagctgaactctttcatcacccagtattctactg |
| | | | gccaagtcagcgtggagatcgagtgggagctgcagaaggaaaacagcaag |
| | | | cgctggaacccggagatccagtacacttccaactattacaagtctaataa |
| | | | tgttgaatttgctgttaatactgaaggtgtatatagtgaaccccgcccca |
| | | | ttggcaccagatacctgactcgtaatctg |
| 79 | DNA | Adeno- | atggctgccgatggttatcttccagattggctcgaggacaaccttagtga |
| | | Associated | aggaattcgcgagtggtgggctttgaaacctggagcccctcaacccaagg |
| | | Virus 9 | caaatcaacaacatcaagacaacgctcgaggtcttgtgcttccgggttac |
| | | comprising | aaataccttggacccggcaacggactcgacaagggggagccggtcaacgc |
| | | SEQ | agcagacgcggcggccctcgagcacgacaaggcctacgaccagcagctca |
| | | ID NO: 6 | aggccggagacaacccgtacctcaagtacaaccacgccgacgccgagttc |
| | | | caggagcggctcaaagaagatacgtcttttgggggcaacctcgggcgagc |
| | | | agtcttccaggccaaaaagaggcttcttgaacctcttggtctggttgagg |
| | | | aagcggctaagacggctcctggaaagaagaggcctgtagagcagtctcct |
| | | | caggaaccggactcctccggggtattggcaaatcgggtgcacagcccgct |
| | | | aaaaagagactcaatttcggtcagactggcgacacagagtcagtcccaga |
| | | | ccctcaaccaatcggagaacctcccgcagccccctcaggtgtgggatctc |
| | | | ttacaatggcttcaggtggtggcgcaccagtggcagacaataacgaaggt |
| | | | gccgatggagtgggtagttcctcgggaaattggcattgcgattcccaatg |
| | | | gctgggggacagagtcatcaccaccagcacccgaacctgggccctgccca |
| | | | cctacaacaatcacctctacaagcaaatctccaacagcacatctggagga |
| | | | tcttcaaatgacaacgcctacttcggctacagcaccccctgggggtattt |
| | | | tgacttcaacagattccactgccacttctcaccacgtgactggcagcgac |
| | | | tcatcaacaacaactggggattccggcctaagcgactcaacttcaagctc |
| | | | ttcaacattcaggtcaaagaggttacggacaacaatggagtcaagaccat |
| | | | cgccaataaccttaccagcacggtccaggtcttcacggactcagactatc |
| | | | agctcccgtacgtgctcgggtcggctcacgagggctgcctcccgccgttc |
| | | | ccagcggacgttttcatgattcctcagtacgggtatctgacgcttaatga |
| | | | tggaagccaggccgtgggtcgttcgtccttttactgcctggaatatttcc |
| | | | cgtcgcaaatgctaagaacgggtaacaacttccagttcagctacgagttt |
| | | | gagaacgtacctttccatagcagctacgctcacagccaaagcctggaccg |
| | | | actaatgaatccactcatcgaccaatacttgtactatctctcTaGAacta |
| | | | ttAACGGTTCTGGACAGAATCAAcaaacgctaaaattcagtgtggccgga |
| | | | cccagcaacatggctgtccagggaagaaactacatacctggacccagcta |
| | | | ccgacaacaacgtgtctcaaccactgtgactcaaaacaacaacagcgaat |
| | | | ttgcttggcctggagcttcttcttgggctctcaatggacgtaatagcttg |
| | | | atgaatcctggacctgctatggccagccacaaagaaggagaggaccgttt |
| | | | ctttcctttgtctggatctttaatttttggcaaacaaggTacCggCagag |
| | | | acaacgtggatgcggacaaagtcatgataaccaacgaagaagaaattaaa |
| | | | actactaacccggtagcaacggagtcctatggacaagtggccacaaacca |
| | | | ccagagtGCTCAAATCCGAATGCCAACCGAATTTGCTCAGGCGCAAaccg |
| | | | gttgggttcaaaaccaaggaatacttccgggtatggtttggcaggacaga |
| | | | gatgtgtacctgcaaggacccatttgggccaaaattcctcacacggacgg |
| | | | caactttcacccttctccgctgatgggagggtttggaatgaagcacccgc |
| | | | ctcctcagatcctcatcaaaaacacacctgtacctgcggatcctccaacg |
| | | | gccttcaacaaggacaagctgaactctttcatcacccagtattctactgg |
| | | | ccaagtcagcgtggagatcgagtgggagctgcagaaggaaaacagcaagc |
| | | | gctggaacccggagatccagtacacttccaactattacaagtctaataat |
| | | | gttgaatttgctgttaatactgaaggtgtatatagtgaaccccgccccat |
| | | | tggcaccagatacctgactcgtaatctg |
| 80 | DNA | Adeno- | atggctgccgatggttatcttccagattggctcgaggacaaccttagtga |
| | | Associated | aggaattcgcgagtggtgggctttgaaacctggagcccctcaacccaagg |
| | | Virus 9 | caaatcaacaacatcaagacaacgctcgaggtcttgtgcttccgggttac |
| | | comprising | aaataccttggacccggcaacggactcgacaagggggagccggtcaacgc |
| | | SEQ | agcagacgcggcggccctcgagcacgacaaggcctacgaccagcagctca |
| | | ID NO: 6 | aggccggagacaacccgtacctcaagtacaaccacgccgacgccgagttc |
| | | | caggagcggctcaaagaagatacgtcttttgggggcaacctcgggcgagc |
| | | | agtcttccaggccaaaaagaggcttcttgaacctcttggtctggttgagg |
| | | | aagcggctaagacggctcctggaaagaagaggcctgtagagcagtctcct |
| | | | caggaaccggactcctccgcgggtattggcaaatcgggtgcacagcccgc |
| | | | taaaaagagactcaatttcggtcagactggcgacacagagtcagtcccag |
| | | | accctcaaccaatcggagaacctcccgcagccccctcaggtgtgggatct |
| | | | cttacaatggcttcaggtggtggcgcaccagtggcagacaataacgaagg |
| | | | tgccgatggagtgggtagttcctcgggaaattggcattgcgattcccaat |
| | | | ggctgggggacagagtcatcaccaccagcacccgaacctgggccctgccc |
| | | | acctacaacaatcacctctacaagcaaatctccaacagcacatctggagg |
| | | | atcttcaaatgacaacgcctacttcggctacagcaccccctgggggtatt |
| | | | ttgacttcaacagattccactgccacttctcaccacgtgactggcagcga |
| | | | ctcatcaacaacaactggggattccggcctaagcgactcaacttcaagct |
| | | | cttcaacattcaggtcaaagaggttacggacaacaatggagtcaagacca |
| | | | tcgccaataaccttaccagcacggtccaggtcttcacggactcagactat |
| | | | cagctcccgtacgtgctcgggtcggctcacgagggctgcctcccgccgtt |
| | | | cccagcggacgttttcatgattcctcagtacgggtatctgacgcttaatg |
| | | | atggaagccaggccgtgggtcgttcgtccttttactgcctggaatatttc |
| | | | ccgtcgcaaatgctaagaacgggtaacaacttccagttcagctacgagtt |
| | | | tgagaacgtacctttccatagcagctacgctcacagccaaagcctggacc |
| | | | gactaatgaatccactcatcgaccaatacttgtactatctctcTaGAact |
| | | | attAACGGTTCTGGACAGAATCAAcaaacgctaaaattcagtgtggccgg |
| | | | acccagcaacatggctgtccagggaagaaactacatacctggacccagct |
| | | | accgacaacaacgtgtctcaaccactgtgactcaaaacaacaacagcgaa |
| | | | tttgcttggcctggagcttcttcttgggctctcaatggacgtaatagctt |
| | | | gatgaatcctggacctgctatggccagccacaaagaaggagaggaccgtt |
| | | | tctttcctttgtctggatctttaatttttggcaaacaaggTacCggCaga |
| | | | gacaacgtggatgcggacaaagtcatgataaccaacgaagaagaaattaa |
| | | | aactactaacccggtagcaacggagtcctatggacaagtggccacaaacc |
| | | | accagagtGCCCAGATACGTATGCCAACCGAGTTTGCCCAAGCGCAGacc |
| | | | ggttgggttcaaaaccaaggaatacttccgggtatggtttggcaggacag |
| | | | agatgtgtacctgcaaggacccatttgggccaaaattcctcacacggacg |
| | | | gcaactttcacccttctccgctgatgggagggtttggaatgaagcacccg |
| | | | cctcctcagatcctcatcaaaaacacacctgtacctgcggatcctccaac |
| | | | ggccttcaacaaggacaagctgaactctttcatcacccagtattctactg |
| | | | gccaagtcagcgtggagatcgagtgggagctgcagaaggaaaacagcaag |
| | | | cgctggaacccggagatccagtacacttccaactattacaagtctaataa |
| | | | tgttgaatttgctgttaatactgaaggtgtatatagtgaaccccgcccca |
| | | | ttggcaccagatacctgactcgtaatctg |
| 81 | DNA | Adeno- | atggctgccgatggttatcttccagattggctcgaggacaaccttagtga |
| | | Associated | aggaattcgcgagtggtgggctttgaaacctggagcccctcaacccaagg |
| | | Virus 9 | caaatcaacaacatcaagacaacgctcgaggtcttgtgcttccgggttac |
| | | comprising | aaataccttggacccggcaacggactcgacaagggggagccggtcaacgc |
| | | SEQ | agcagacgcggcggccctcgagcacgacaaggcctacgaccagcagctca |
| | | ID NO: 7 | aggccggagacaacccgtacctcaagtacaaccacgccgacgccgagttc |
| | | | caggagcggctcaaagaagatacgtcttttgggggcaacctcgggcgagc |
| | | | agtcttccaggccaaaaagaggcttcttgaacctcttggtctggttgagg |
| | | | aagcggctaagacggctcctggaaagaagaggcctgtagagcagtctcct |
| | | | caggaaccggactcctccgcgggtattggcaaatcgggtgcacagcccgc |
| | | | taaaaagagactcaatttcggtcagactggcgacacagagtcagtcccag |
| | | | accctcaaccaatcggagaacctcccgcagccccctcaggtgtgggatct |
| | | | cttacaatggcttcaggtggtggcgcaccagtggcagacaataacgaagg |
| | | | tgccgatggagtgggtagttcctcgggaaattggcattgcgattcccaat |
| | | | ggctgggggacagagtcatcaccaccagcacccgaacctgggccctgccc |
| | | | acctacaacaatcacctctacaagcaaatctccaacagcacatctggagg |
| | | | atcttcaaatgacaacgcctacttcggctacagcaccccctgggggtatt |
| | | | ttgacttcaacagattccactgccacttctcaccacgtgactggcagcga |
| | | | ctcatcaacaacaactggggattccggcctaagcgactcaacttcaagct |
| | | | cttcaacattcaggtcaaagaggttacggacaacaatggagtcaagacca |
| | | | tcgccaataaccttaccagcacggtccaggtcttcacggactcagactat |
| | | | cagctcccgtacgtgctcgggtcggctcacgagggctgcctcccgccgtt |
| | | | cccagcggacgttttcatgattcctcagtacgggtatctgacgcttaatg |
| | | | atggaagccaggccgtgggtcgttcgtccttttactgcctggaatatttc |
| | | | ccgtcgcaaatgctaagaacgggtaacaacttccagttcagctacgagtt |
| | | | tgagaacgtacctttccatagcagctacgctcacagccaaagcctggacc |
| | | | gactaatgaatccactcatcgaccaatacttgtactatctctcTaGAact |
| | | | attAACGGTTCTGGACAGAATCAAcaaacgctaaaattcagtgtggccgg |
| | | | acccagcaacatggctgtccagggaagaaactacatacctggacccagct |
| | | | accgacaacaacgtgtctcaaccactgtgactcaaaacaacaacagcgaa |
| | | | tttgcttggcctggagcttcttcttgggctctcaatggacgtaatagctt |
| | | | gatgaatcctggacctgctatggccagccacaaagaaggagaggaccgtt |
| | | | tctttcctttgtctggatctttaatttttggcaaacaaggTacCggCaga |
| | | | gacaacgtggatgcggacaaagtcatgataaccaacgaagaagaaattaa |
| | | | aactactaacccggtagcaacggagtcctatggacaagtggccacaaacc |
| | | | accagagtGCTCAAATACGTCAGCCACAGGAATTCGCTCAGGCCCAGacc |
| | | | ggttgggttcaaaaccaaggaatacttccgggtatggtttggcaggacag |
| | | | agatgtgtacctgcaaggacccatttgggccaaaattcctcacacggacg |
| | | | gcaactttcacccttctccgctgatgggagggtttggaatgaagcacccg |
| | | | cctcctcagatcctcatcaaaaacacacctgtacctgcggatcctccaac |
| | | | ggccttcaacaaggacaagctgaactctttcatcacccagtattctactg |
| | | | gccaagtcagcgtggagatcgagtgggagctgcagaaggaaaacagcaag |
| | | | cgctggaacccggagatccagtacacttccaactattacaagtctaataa |
| | | | tgttgaatttgctgttaatactgaaggtgtatatagtgaaccccgcccca |
| | | | ttggcaccagatacctgactcgtaatctg |
| 82 | DNA | Adeno- | atggctgccgatggttatcttccagattggctcgaggacaaccttagtga |
| | | Associated | aggaattcgcgagtggtgggctttgaaacctggagcccctcaacccaagg |
| | | Virus 9 | caaatcaacaacatcaagacaacgctcgaggtcttgtgcttccgggttac |
| | | comprising | aaataccttggacccggcaacggactcgacaagggggagccggtcaacgc |
| | | SEQ | agcagacgcggcggccctcgagcacgacaaggcctacgaccagcagctca |
| | | ID NO: 7 | aggccggagacaacccgtacctcaagtacaaccacgccgacgccgagttc |
| | | | caggagcggctcaaagaagatacgtcttttgggggcaacctcgggcgagc |
| | | | agtcttccaggccaaaaagaggcttcttgaacctcttggtctggttgagg |
| | | | aagcggctaagacggctcctggaaagaagaggcctgtagagcagtctcct |
| | | | caggaaccggactcctccgcgggtattggcaaatcgggtgcacagcccgc |
| | | | taaaaagagactcaatttcggtcagactggcgacacagagtcagtcccag |
| | | | accctcaaccaatcggagaacctcccgcagccccctcaggtgtgggatct |
| | | | cttacaatggcttcaggtggtggcgcaccagtggcagacaataacgaagg |
| | | | tgccgatggagtgggtagttcctcgggaaattggcattgcgattcccaat |
| | | | ggctgggggacagagtcatcaccaccagcacccgaacctgggccctgccc |
| | | | acctacaacaatcacctctacaagcaaatctccaacagcacatctggagg |
| | | | atcttcaaatgacaacgcctacttcggctacagcaccccctgggggtatt |
| | | | ttgacttcaacagattccactgccacttctcaccacgtgactggcagcga |
| | | | ctcatcaacaacaactggggattccggcctaagcgactcaacttcaagct |
| | | | cttcaacattcaggtcaaagaggttacggacaacaatggagtcaagacca |
| | | | tcgccaataaccttaccagcacggtccaggtcttcacggactcagactat |
| | | | cagctcccgtacgtgctcgggtcggctcacgagggctgcctcccgccgtt |
| | | | cccagcggacgttttcatgattcctcagtacgggtatctgacgcttaatg |
| | | | atggaagccaggccgtgggtcgttcgtccttttactgcctggaatatttc |
| | | | ccgtcgcaaatgctaagaacgggtaacaacttccagttcagctacgagtt |
| | | | tgagaacgtacctttccatagcagctacgctcacagccaaagcctggacc |
| | | | gactaatgaatccactcatcgaccaatacttgtactatctctcTaGAact |
| | | | attAACGGTTCTGGACAGAATCAAcaaacgctaaaattcagtgtggccgg |
| | | | acccagcaacatggctgtccagggaagaaactacatacctggacccagct |
| | | | accgacaacaacgtgtctcaaccactgtgactcaaaacaacaacagcgaa |
| | | | tttgcttggcctggagcttcttcttgggctctcaatggacgtaatagctt |
| | | | gatgaatcctggacctgctatggccagccacaaagaaggagaggaccgtt |
| | | | tctttcctttgtctggatctttaatttttggcaaacaaggTacCggCaga |
| | | | gacaacgtggatgcggacaaagtcatgataaccaacgaagaagaaattaa |
| | | | aactactaacccggtagcaacggagtcctatggacaagtggccacaaacc |
| | | | accagagtGCACAAATTCGGCAACCACAAGAGTTCGCTCAAGCTCAGacc |
| | | | ggttgggttcaaaaccaaggaatacttccgggtatggtttggcaggacag |
| | | | agatgtgtacctgcaaggacccatttgggccaaaattcctcacacggacg |
| | | | gcaactttcacccttctccgctgatgggagggtttggaatgaagcacccg |
| | | | cctcctcagatcctcatcaaaaacacacctgtacctgcggatcctccaac |
| | | | ggccttcaacaaggacaagctgaactctttcatcacccagtattctactg |
| | | | gccaagtcagcgtggagatcgagtgggagctgcagaaggaaaacagcaag |
| | | | cgctggaacccggagatccagtacacttccaactattacaagtctaataa |
| | | | tgttgaatttgctgttaatactgaaggtgtatatagtgaaccccgcccca |
| | | | ttggcaccagatacctgactcgtaatctg |
| 83 | DNA | Adeno- | atggctgccgatggttatcttccagattggctcgaggacaaccttagtga |
| | | Associated | aggaattcgcgagtggtgggctttgaaacctggagcccctcaacccaagg |
| | | Virus 9 | caaatcaacaacatcaagacaacgctcgaggtcttgtgcttccgggttac |
| | | comprising | aaataccttggacccggcaacggactcgacaagggggagccggtcaacgc |
| | | SEQ | agcagacgcggcggccctcgagcacgacaaggcctacgaccagcagctca |
| | | ID NO: 7 | aggccggagacaacccgtacctcaagtacaaccacgccgacgccgagttc |
| | | | caggagcggctcaaagaagatacgtcttttgggggcaacctcgggcgagc |
| | | | agtcttccaggccaaaaagaggcttcttgaacctcttggtctggttgagg |
| | | | aagcggctaagacggctcctggaaagaagaggcctgtagagcagtctcct |
| | | | caggaaccggactcctccgcgggtattggcaaatcgggtgcacagcccgc |
| | | | taaaaagagactcaatttcggtcagactggcgacacagagtcagtcccag |
| | | | accctcaaccaatcggagaacctcccgcagccccctcaggtgtgggatct |
| | | | cttacaatggcttcaggtggtggcgcaccagtggcagacaataacgaagg |
| | | | tgccgatggagtgggtagttcctcgggaaattggcattgcgattcccaat |
| | | | ggctgggggacagagtcatcaccaccagcacccgaacctgggccctgccc |
| | | | acctacaacaatcacctctacaagcaaatctccaacagcacatctggagg |
| | | | atcttcaaatgacaacgcctacttcggctacagcaccccctgggggtatt |
| | | | ttgacttcaacagattccactgccacttctcaccacgtgactggcagcga |
| | | | ctcatcaacaacaactggggattccggcctaagcgactcaacttcaagct |
| | | | cttcaacattcaggtcaaagaggttacggacaacaatggagtcaagacca |
| | | | tcgccaataaccttaccagcacggtccaggtcttcacggactcagactat |
| | | | cagctcccgtacgtgctcgggtcggctcacgagggctgcctcccgccgtt |
| | | | cccagcggacgttttcatgattcctcagtacgggtatctgacgcttaatg |
| | | | atggaagccaggccgtgggtcgttcgtccttttactgcctggaatatttc |
| | | | ccgtcgcaaatgctaagaacgggtaacaacttccagttcagctacgagtt |
| | | | tgagaacgtacctttccatagcagctacgctcacagccaaagcctggacc |
| | | | gactaatgaatccactcatcgaccaatacttgtactatctctcTaGAact |
| | | | attAACGGTTCTGGACAGAATCAAcaaacgctaaaattcagtgtggccgg |
| | | | acccagcaacatggctgtccagggaagaaactacatacctggacccagct |
| | | | accgacaacaacgtgtctcaaccactgtgactcaaaacaacaacagcgaa |
| | | | tttgcttggcctggagcttcttcttgggctctcaatggacgtaatagctt |
| | | | gatgaatcctggacctgctatggccagccacaaagaaggagaggaccgtt |
| | | | tctttcctttgtctggatctttaatttttggcaaacaaggTacCggCaga |
| | | | gacaacgtggatgcggacaaagtcatgataaccaacgaagaagaaattaa |
| | | | aactactaacccggtagcaacggagtcctatggacaagtggccacaaacc |
| | | | accagagtGCCCAGATCCGCCAGCCTCAGGAATTTGCACAGGCACAAacc |
| | | | ggttgggttcaaaaccaaggaatacttccgggtatggtttggcaggacag |
| | | | agatgtgtacctgcaaggacccatttgggccaaaattcctcacacggacg |
| | | | gcaactttcacccttctccgctgatgggagggtttggaatgaagcacccg |
| | | | cctcctcagatcctcatcaaaaacacacctgtacctgcggatcctccaac |
| | | | ggccttcaacaaggacaagctgaactctttcatcacccagtattctactg |
| | | | gccaagtcagcgtggagatcgagtgggagctgcagaaggaaaacagcaag |
| | | | cgctggaacccggagatccagtacacttccaactattacaagtctaataa |
| | | | tgttgaatttgctgttaatactgaaggtgtatatagtgaaccccgcccca |
| | | | ttggcaccagatacctgactcgtaatctg |
| 84 | DNA | Adeno- | atggctgccgatggttatcttccagattggctcgaggacaaccttagtga |
| | | Associated | aggaattcgcgagtggtgggctttgaaacctggagcccctcaacccaagg |
| | | Virus 9 | caaatcaacaacatcaagacaacgctcgaggtcttgtgcttccgggttac |
| | | comprising | aaataccttggacccggcaacggactcgacaagggggagccggtcaacgc |
| | | SEQ | agcagacgcggcggccctcgagcacgacaaggcctacgaccagcagctca |
| | | ID NO: 7 | aggccggagacaacccgtacctcaagtacaaccacgccgacgccgagttc |
| | | | caggagcggctcaaagaagatacgtcttttgggggcaacctcgggcgagc |
| | | | agtcttccaggccaaaaagaggcttcttgaacctcttggtctggttgagg |
| | | | aagcggctaagacggctcctggaaagaagaggcctgtagagcagtctcct |
| | | | caggaaccggactcctccgcgggtattggcaaatcgggtgcacagcccgc |
| | | | taaaaagagactcaatttcggtcagactggcgacacagagtcagtcccag |
| | | | accctcaaccaatcggagaacctcccgcagccccctcaggtgtgggatct |
| | | | cttacaatggcttcaggtggtggcgcaccagtggcagacaataacgaagg |
| | | | tgccgatggagtgggtagttcctcgggaaattggcattgcgattcccaat |
| | | | ggctgggggacagagtcatcaccaccagcacccgaacctgggccctgccc |
| | | | acctacaacaatcacctctacaagcaaatctccaacagcacatctggagg |
| | | | atcttcaaatgacaacgcctacttcggctacagcaccccctgggggtatt |
| | | | ttgacttcaacagattccactgccacttctcaccacgtgactggcagcga |
| | | | ctcatcaacaacaactggggattccggcctaagcgactcaacttcaagct |
| | | | cttcaacattcaggtcaaagaggttacggacaacaatggagtcaagacca |
| | | | tcgccaataaccttaccagcacggtccaggtcttcacggactcagactat |
| | | | cagctcccgtacgtgctcgggtcggctcacgagggctgcctcccgccgtt |
| | | | cccagcggacgttttcatgattcctcagtacgggtatctgacgcttaatg |
| | | | atggaagccaggccgtgggtcgttcgtccttttactgcctggaatatttc |
| | | | ccgtcgcaaatgctaagaacgggtaacaacttccagttcagctacgagtt |
| | | | tgagaacgtacctttccatagcagctacgctcacagccaaagcctggacc |
| | | | gactaatgaatccactcatcgaccaatacttgtactatctctcTaGAact |
| | | | attAACGGTTCTGGACAGAATCAAcaaacgctaaaattcagtgtggccgg |
| | | | acccagcaacatggctgtccagggaagaaactacatacctggacccagct |
| | | | accgacaacaacgtgtctcaaccactgtgactcaaaacaacaacagcgaa |
| | | | tttgcttggcctggagcttcttcttgggctctcaatggacgtaatagctt |
| | | | gatgaatcctggacctgctatggccagccacaaagaaggagaggaccgtt |
| | | | tctttcctttgtctggatctttaatttttggcaaacaaggTacCggCaga |
| | | | gacaacgtggatgcggacaaagtcatgataaccaacgaagaagaaattaa |
| | | | aactactaacccggtagcaacggagtcctatggacaagtggccacaaacc |
| | | | accagagtGCACAGATAAGACAACCTCAGGAATTTGCGCAGGCACAAacc |
| | | | ggttgggttcaaaaccaaggaatacttccgggtatggtttggcaggacag |
| | | | agatgtgtacctgcaaggacccatttgggccaaaattcctcacacggacg |
| | | | gcaactttcacccttctccgctgatgggagggtttggaatgaagcacccg |
| | | | cctcctcagatcctcatcaaaaacacacctgtacctgcggatcctccaac |
| | | | ggccttcaacaaggacaagctgaactctttcatcacccagtattctactg |
| | | | gccaagtcagcgtggagatcgagtgggagctgcagaaggaaaacagcaag |
| | | | cgctggaacccggagatccagtacacttccaactattacaagtctaataa |
| | | | tgttgaatttgctgttaatactgaaggtgtatatagtgaaccccgcccca |
| | | | ttggcaccagatacctgactcgtaatctg |
| 85 | DNA | Adeno- | atggctgccgatggttatcttccagattggctcgaggacaaccttagtga |
| | | Associated | aggaattcgcgagtggtgggctttgaaacctggagcccctcaacccaagg |
| | | Virus 9 | caaatcaacaacatcaagacaacgctcgaggtcttgtgcttccgggttac |
| | | comprising | aaataccttggacccggcaacggactcgacaagggggagccggtcaacgc |
| | | SEQ | agcagacgcggcggccctcgagcacgacaaggcctacgaccagcagctca |
| | | ID NO: 7 | aggrcggagacaacccgtacctcaagtacaaccacgccgacgccgagttc |
| | | | caggagcggctcaaagaagatacgtcttttgggggcaacctcgggcgagc |
| | | | agtcttccaggccaaaaagaggcttcttgaacctcttggtctggttgagg |
| | | | aagcggctaagacggctcctggaaagaagaggcctgtagagcagtctcct |
| | | | caggaaccggactcctccggggtattggcaaatcgggtgcacagcccgct |
| | | | aaaaagagactcaatttcggtcagactggcgacacagagtcagtcccaga |
| | | | ccctcaaccaatcggagaacctcccgcagccccctcaggtgtgggatctc |
| | | | ttacaatggcttcaggtggtggcgcaccagtggcagacaataacgaaggt |
| | | | gccgatggagtgggtagttcctcgggaaattggcattgcgattcccaatg |
| | | | gctgggggacagagtcatcaccaccagcacccgaacctgggccctgccca |
| | | | cctacaacaatcacctctacaagcaaatctccaacagcacatctggagga |
| | | | tcttcaaatgacaacgcctacttcggctacagcaccccctgggggtattt |
| | | | tgacttcaacagattccactgccacttctcaccacgtgactggcagcgac |
| | | | tcatcaacaacaactggggattccggcctaagcgactcaacttcaagctc |
| | | | ttcaacattcaggtcaaagaggttacggacaacaatggagtcaagaccat |
| | | | cgccaataaccttaccagcacggtccaggtcttcacggactcagactatc |
| | | | agctcccgtacgtgctcgggtcggctcacgagggctgcctcccgccgttc |
| | | | ccagcggacgttttcatgattcctcagtacgggtatctgacgcttaatga |
| | | | tggaagccaggccgtgggtcgttcgtccttttactgcctggaatatttcc |
| | | | cgtcgcaaatgctaagaacgggtaacaacttccagttcagctacgagttt |
| | | | gagaacgtacctttccatagcagctacgctcacagccaaagcctggaccg |
| | | | actaatgaatccactcatcgaccaatacttgtactatctctcTaGAacta |
| | | | ttAACGGTTCTGGACAGAATCAAcaaacgctaaaattcagtgtggccgga |
| | | | cccagcaacatggctgtccagggaagaaactacatacctggacccagcta |
| | | | ccgacaacaacgtgtctcaaccactgtgactcaaaacaacaacagcgaat |
| | | | ttgcttggcctggagcttcttcttgggctctcaatggacgtaatagcttg |
| | | | atgaatcctggacctgctatggccagccacaaagaaggagaggaccgttt |
| | | | ctttcctttgtctggatctttaatttttggcaaacaaggTacCggCagag |
| | | | acaacgtggatgcggacaaagtcatgataaccaacgaagaagaaattaaa |
| | | | actactaacccggtagcaacggagtcctatggacaagtggccacaaacca |
| | | | ccagagtGCCCAAATTCGTCAGCCCCAAGAGTTCGCCCAAGCTCAGaccg |
| | | | gttgggttcaaaaccaaggaatacttccgggtatggtttggcaggacaga |
| | | | gatgtgtacctgcaaggacccatttgggccaaaattcctcacacggacgg |
| | | | caactttcacccttctccgctgatgggagggtttggaatgaagcacccgc |
| | | | ctcctcagatcctcatcaaaaacacacctgtacctgcggatcctccaacg |
| | | | gccttcaacaaggacaagctgaactctttcatcacccagtattctactgg |
| | | | ccaagtcagcgtggagatcgagtgggagctgcagaaggaaaacagcaagc |
| | | | gctggaacccggagatccagtacacttccaactattacaagtctaataat |
| | | | gttgaatttgctgttaatactgaaggtgtatatagtgaaccccgccccat |
| | | | tggcaccagatacctgactcgtaatctg |
| 86 | DNA | Adeno- | atggctgccgatggttatcttccagattggctcgaggacaaccttagtga |
| | | Associated | aggaattcgcgagtggtgggctttgaaacctggagcccctcaacccaagg |
| | | Virus 9 | caaatcaacaacatcaagacaacgctcgaggtcttgtgcttccgggttac |
| | | comprising | aaataccttggacccggcaacggactcgacaagggggagccggtcaacgc |
| | | SEQ | agcagacgcggcggccctcgagcacgacaaggcctacgaccagcagctca |
| | | ID NO: 7 | aggrcggagacaacccgtacctcaagtacaaccacgccgacgccgagttc |
| | | | caggagcggctcaaagaagatacgtcttttgggggcaacctcgggcgagc |
| | | | agtcttccaggccaaaaagaggcttcttgaacctcttggtctggttgagg |
| | | | aagcggctaagacggctcctggaaagaagaggcctgtagagcagtctcct |
| | | | caggaaccggactcctccgcgggtattggcaaatcgggtgcacagcccgc |
| | | | taaaaagagactcaatttcggtcagactggcgacacagagtcagtcccag |
| | | | accctcaaccaatcggagaacctcccgcagccccctcaggtgtgggatct |
| | | | cttacaatggcttcaggtggtggcgcaccagtggcagacaataacgaagg |
| | | | tgccgatggagtgggtagttcctcgggaaattggcattgcgattcccaat |
| | | | ggctgggggacagagtcatcaccaccagcacccgaacctgggccctgccc |
| | | | acctacaacaatcacctctacaagcaaatctccaacagcacatctggagg |
| | | | atcttcaaatgacaacgcctacttcggctacagcaccccctgggggtatt |
| | | | ttgacttcaacagattccactgccacttctcaccacgtgactggcagcga |
| | | | ctcatcaacaacaactggggattccggcctaagcgactcaacttcaagct |
| | | | cttcaacattcaggtcaaagaggttacggacaacaatggagtcaagacca |
| | | | tcgccaataaccttaccagcacggtccaggtcttcacggactcagactat |
| | | | cagctcccgtacgtgctcgggtcggctcacgagggctgcctcccgccgtt |
| | | | cccagcggacgttttcatgattcctcagtacgggtatctgacgcttaatg |
| | | | atggaagccaggccgtgggtcgttcgtccttttactgcctggaatatttc |
| | | | ccgtcgcaaatgctaagaacgggtaacaacttccagttcagctacgagtt |
| | | | tgagaacgtacctttccatagcagctacgctcacagccaaagcctggacc |
| | | | gactaatgaatccactcatcgaccaatacttgtactatctctcTaGAact |
| | | | attAACGGTTCTGGACAGAATCAAcaaacgctaaaattcagtgtggccgg |
| | | | acccagcaacatggctgtccagggaagaaactacatacctggacccagct |
| | | | accgacaacaacgtgtctcaaccactgtgactcaaaacaacaacagcgaa |
| | | | tttgcttggcctggagcttcttcttgggctctcaatggacgtaatagctt |
| | | | gatgaatcctggacctgctatggccagccacaaagaaggagaggaccgtt |
| | | | tctttcctttgtctggatctttaatttttggcaaacaaggTacCggCaga |
| | | | gacaacgtggatgcggacaaagtcatgataaccaacgaagaagaaattaa |
| | | | aactactaacccggtagcaacggagtcctatggacaagtggccacaaacc |
| | | | accagagtGCACAGATTCGACAACCCCAAGAGTTTGCCCAAGCACAAacc |
| | | | ggttgggttcaaaaccaaggaatacttccgggtatggtttggcaggacag |
| | | | agatgtgtacctgcaaggacccatttgggccaaaattcctcacacggacg |
| | | | gcaactttcacccttctccgctgatgggagggtttggaatgaagcacccg |
| | | | cctcctcagatcctcatcaaaaacacacctgtacctgcggatcctccaac |
| | | | ggccttcaacaaggacaagctgaactctttcatcacccagtattctactg |
| | | | gccaagtcagcgtggagatcgagtgggagctgcagaaggaaaacagcaag |
| | | | cgctggaacccggagatccagtacacttccaactattacaagtctaataa |
| | | | tgttgaatttgctgttaatactgaaggtgtatatagtgaaccccgcccca |
| | | | ttggcaccagatacctgactcgtaatctg |
| 87 | DNA | Adeno- | atggctgccgatggttatcttccagattggctcgaggacaaccttagtga |
| | | Associated | aggaattcgcgagtggtgggctttgaaacctggagcccctcaacccaagg |
| | | Virus 9 | caaatcaacaacatcaagacaacgctcgaggtcttgtgcttccgggttac |
| | | comprising | aaataccttggacccggcaacggactcgacaagggggagccggtcaacgc |
| | | SEQ | agcagacgcggcggccctcgagcacgacaaggcctacgaccagcagctca |
| | | ID NO: 7 | aggccggagacaacccgtacctcaagtacaaccacgccgacgccgagttc |
| | | | caggagcggctcaaagaagatacgtcttttgggggcaacctcgggcgagc |
| | | | agtcttccaggccaaaaagaggcttcttgaacctcttggtctggttgagg |
| | | | aagcggctaagacggctcctggaaagaagaggcctgtagagcagtctcct |
| | | | caggaaccggactcctccgcgggtattggcaaatcgggtgcacagcccgc |
| | | | taaaaagagactcaatttcggtcagactggcgacacagagtcagtcccag |
| | | | accctcaaccaatcggagaacctcccgcagccccctcaggtgtgggatct |
| | | | cttacaatggcttcaggtggtggcgcaccagtggcagacaataacgaagg |
| | | | tgccgatggagtgggtagttcctcgggaaattggcattgcgattcccaat |
| | | | ggctgggggacagagtcatcaccaccagcacccgaacctgggccctgccc |
| | | | acctacaacaatcacctctacaagcaaatctccaacagcacatctggagg |
| | | | atcttcaaatgacaacgcctacttcggctacagcaccccctgggggtatt |
| | | | ttgacttcaacagattccactgccacttctcaccacgtgactggcagcga |
| | | | ctcatcaacaacaactggggattccggcctaagcgactcaacttcaagct |
| | | | cttcaacattcaggtcaaagaggttacggacaacaatggagtcaagacca |
| | | | tcgccaataaccttaccagcacggtccaggtcttcacggactcagactat |
| | | | cagctcccgtacgtgctcgggtcggctcacgagggctgcctcccgccgtt |
| | | | cccagcggacgttttcatgattcctcagtacgggtatctgacgcttaatg |
| | | | atggaagccaggccgtgggtcgttcgtccttttactgcctggaatatttc |
| | | | ccgtcgcaaatgctaagaacgggtaacaacttccagttcagctacgagtt |
| | | | tgagaacgtacctttccatagcagctacgctcacagccaaagcctggacc |
| | | | gactaatgaatccactcatcgaccaatacttgtactatctctcTaGAact |
| | | | attAACGGTTCTGGACAGAATCAAcaaacgctaaaattcagtgtggccgg |
| | | | acccagcaacatggctgtccagggaagaaactacatacctggacccagct |
| | | | accgacaacaacgtgtctcaaccactgtgactcaaaacaacaacagcgaa |
| | | | tttgcttggcctggagcttcttcttgggctctcaatggacgtaatagctt |
| | | | gatgaatcctggacctgctatggccagccacaaagaaggagaggaccgtt |
| | | | tctttcctttgtctggatctttaatttttggcaaacaaggTacCggCaga |
| | | | gacaacgtggatgcggacaaagtcatgataaccaacgaagaagaaattaa |
| | | | aactactaacccggtagcaacggagtcctatggacaagtggccacaaacc |
| | | | accagagtGCTCAGATTAGACAACCTCAGGAGTTTGCGCAAGCGCAAacc |
| | | | ggttgggttcaaaaccaaggaatacttccgggtatggtttggcaggacag |
| | | | agatgtgtacctgcaaggacccatttgggccaaaattcctcacacggacg |
| | | | gcaactttcacccttctccgctgatgggagggtttggaatgaagcacccg |
| | | | cctcctcagatcctcatcaaaaacacacctgtacctgcggatcctccaac |
| | | | ggccttcaacaaggacaagctgaactctttcatcacccagtattctactg |
| | | | gccaagtcagcgtggagatcgagtgggagctgcagaaggaaaacagcaag |
| | | | cgctggaacccggagatccagtacacttccaactattacaagtctaataa |
| | | | tgttgaatttgctgttaatactgaaggtgtatatagtgaaccccgcccca |
| | | | ttggcaccagatacctgactcgtaatctg |
| 88 | DNA | Adeno- | atggctgccgatggttatcttccagattggctcgaggacaaccttagtga |
| | | Associated | aggaattcgcgagtggtgggctttgaaacctggagcccctcaacccaagg |
| | | Virus 9 | caaatcaacaacatcaagacaacgctcgaggtcttgtgcttccgggttac |
| | | comprising | aaataccttggacccggcaacggactcgacaagggggagccggtcaacgc |
| | | SEQ | agcagacgcggcggccctcgagcacgacaaggcctacgaccagcagctca |
| | | ID NO: 7 | aggccggagacaacccgtacctcaagtacaaccacgccgacgccgagttc |
| | | | caggagcggctcaaagaagatacgtcttttgggggcaacctcgggcgagc |
| | | | agtcttccaggccaaaaagaggcttcttgaacctcttggtctggttgagg |
| | | | aagcggctaagacggctcctggaaagaagaggcctgtagagcagtctcct |
| | | | caggaaccggactcctccgcgggtattggcaaatcgggtgcacagcccgc |
| | | | taaaaagagactcaatttcggtcagactggcgacacagagtcagtcccag |
| | | | accctcaaccaatcggagaacctcccgcagccccctcaggtgtgggatct |
| | | | cttacaatggcttcaggtggtggcgcaccagtggcagacaataacgaagg |
| | | | tgccgatggagtgggtagttcctcgggaaattggcattgcgattcccaat |
| | | | ggctgggggacagagtcatcaccaccagcacccgaacctgggccctgccc |
| | | | acctacaacaatcacctctacaagcaaatctccaacagcacatctggagg |
| | | | atcttcaaatgacaacgcctacttcggctacagcaccccctgggggtatt |
| | | | ttgacttcaacagattccactgccacttctcaccacgtgactggcagcga |
| | | | ctcatcaacaacaactggggattccggcctaagcgactcaacttcaagct |
| | | | cttcaacattcaggtcaaagaggttacggacaacaatggagtcaagacca |
| | | | tcgccaataaccttaccagcacggtccaggtcttcacggactcagactat |
| | | | cagctcccgtacgtgctcgggtcggctcacgagggctgcctcccgccgtt |
| | | | cccagcggacgttttcatgattcctcagtacgggtatctgacgcttaatg |
| | | | atggaagccaggccgtgggtcgttcgtccttttactgcctggaatatttc |
| | | | ccgtcgcaaatgctaagaacgggtaacaacttccagttcagctacgagtt |
| | | | tgagaacgtacctttccatagcagctacgctcacagccaaagcctggacc |
| | | | gactaatgaatccactcatcgaccaatacttgtactatctctcTaGAact |
| | | | attAACGGTTCTGGACAGAATCAAcaaacgctaaaattcagtgtggccgg |
| | | | acccagcaacatggctgtccagggaagaaactacatacctggacccagct |
| | | | accgacaacaacgtgtctcaaccactgtgactcaaaacaacaacagcgaa |
| | | | tttgcttggcctggagcttcttcttgggctctcaatggacgtaatagctt |
| | | | gatgaatcctggacctgctatggccagccacaaagaaggagaggaccgtt |
| | | | tctttcctttgtctggatctttaatttttggcaaacaaggTacCggCaga |
| | | | gacaacgtggatgcggacaaagtcatgataaccaacgaagaagaaattaa |
| | | | aactactaacccggtagcaacggagtcctatggacaagtggccacaaacc |
| | | | accagagtGCGCAAATCCGCCAGCCGCAAGAATTCGCACAGGCTCAGacc |
| | | | ggttgggttcaaaaccaaggaatacttccgggtatggtttggcaggacag |
| | | | agatgtgtacctgcaaggacccatttgggccaaaattcctcacacggacg |
| | | | gcaactttcacccttctccgctgatgggagggtttggaatgaagcacccg |
| | | | cctcctcagatcctcatcaaaaacacacctgtacctgcggatcctccaac |
| | | | ggccttcaacaaggacaagctgaactctttcatcacccagtattctactg |
| | | | gccaagtcagcgtggagatcgagtgggagctgcagaaggaaaacagcaag |
| | | | cgctggaacccggagatccagtacacttccaactattacaagtctaataa |
| | | | tgttgaatttgctgttaatactgaaggtgtatatagtgaaccccgcccca |
| | | | ttggcaccagatacctgactcgtaatctg |
| 89 | DNA | Adeno- | atggctgccgatggttatcttccagattggctcgaggacaaccttagtga |
| | | Associated | aggaattcgcgagtggtgggctttgaaacctggagcccctcaacccaagg |
| | | Virus 9 | caaatcaacaacatcaagacaacgctcgaggtcttgtgcttccgggttac |
| | | comprising | aaataccttggacccggcaacggactcgacaagggggagccggtcaacgc |
| | | SEQ | agcagacgcggcggccctcgagcacgacaaggcctacgaccagcagctca |
| | | ID NO: 7 | aggccggagacaacccgtacctcaagtacaaccacgccgacgccgagttc |
| | | | caggagcggctcaaagaagatacgtcttttgggggcaacctcgggcgagc |
| | | | agtcttccaggccaaaaagaggcttcttgaacctcttggtctggttgagg |
| | | | aagcggctaagacggctcctggaaagaagaggcctgtagagcagtctcct |
| | | | caggaaccggactcctccgcgggtattggcaaatcgggtgcacagcccgc |
| | | | taaaaagagactcaatttcggtcagactggcgacacagagtcagtcccag |
| | | | accctcaaccaatcggagaacctcccgcagccccctcaggtgtgggatct |
| | | | cttacaatggcttcaggtggtggcgcaccagtggcagacaataacgaagg |
| | | | tgccgatggagtgggtagttcctcgggaaattggcattgcgattcccaat |
| | | | ggctgggggacagagtcatcaccaccagcacccgaacctgggccctgccc |
| | | | acctacaacaatcacctctacaagcaaatctccaacagcacatctggagg |
| | | | atcttcaaatgacaacgcctacttcggctacagcaccccctgggggtatt |
| | | | ttgacttcaacagattccactgccacttctcaccacgtgactggcagcga |
| | | | ctcatcaacaacaactggggattccggcctaagcgactcaacttcaagct |
| | | | cttcaacattcaggtcaaagaggttacggacaacaatggagtcaagacca |
| | | | tcgccaataaccttaccagcacggtccaggtcttcacggactcagactat |
| | | | cagctcccgtacgtgctcgggtcggctcacgagggctgcctcccgccgtt |
| | | | cccagcggacgttttcatgattcctcagtacgggtatctgacgcttaatg |
| | | | atggaagccaggccgtgggtcgttcgtccttttactgcctggaatatttc |
| | | | ccgtcgcaaatgctaagaacgggtaacaacttccagttcagctacgagtt |
| | | | tgagaacgtacctttccatagcagctacgctcacagccaaagcctggacc |
| | | | gactaatgaatccactcatcgaccaatacttgtactatctctcTaGAact |
| | | | attAACGGTTCTGGACAGAATCAAcaaacgctaaaattcagtgtggccgg |
| | | | acccagcaacatggctgtccagggaagaaactacatacctggacccagct |
| | | | accgacaacaacgtgtctcaaccactgtgactcaaaacaacaacagcgaa |
| | | | tttgcttggcctggagcttcttcttgggctctcaatggacgtaatagctt |
| | | | gatgaatcctggacctgctatggccagccacaaagaaggagaggaccgtt |
| | | | tctttcctttgtctggatctttaatttttggcaaacaaggTacCggCaga |
| | | | gacaacgtggatgcggacaaagtcatgataaccaacgaagaagaaattaa |
| | | | aactactaacccggtagcaacggagtcctatggacaagtggccacaaacc |
| | | | accagagtGCCCAGATTCGTCAGCCACAAGAGTTCGCACAAGCGCAGacc |
| | | | ggttgggttcaaaaccaaggaatacttccgggtatggtttggcaggacag |
| | | | agatgtgtacctgcaaggacccatttgggccaaaattcctcacacggacg |
| | | | gcaactttcacccttctccgctgatgggagggtttggaatgaagcacccg |
| | | | cctcctcagatcctcatcaaaaacacacctgtacctgcggatcctccaac |
| | | | ggccttcaacaaggacaagctgaactctttcatcacccagtattctactg |
| | | | gccaagtcagcgtggagatcgagtgggagctgcagaaggaaaacagcaag |
| | | | cgctggaacccggagatccagtacacttccaactattacaagtctaataa |
| | | | tgttgaatttgctgttaatactgaaggtgtatatagtgaaccccgcccca |
| | | | ttggcaccagatacctgactcgtaatctg |
| 90 | DNA | Adeno- | atggctgccgatggttatcttccagattggctcgaggacaaccttagtga |
| | | Associated | aggaattcgcgagtggtgggctttgaaacctggagcccctcaacccaagg |
| | | Virus 9 | caaatcaacaacatcaagacaacgctcgaggtcttgtgcttccgggttac |
| | | comprising | aaataccttggacccggcaacggactcgacaagggggagccggtcaacgc |
| | | SEQ | agcagacgcggcggccctcgagcacgacaaggcctacgaccagcagctca |
| | | ID NO: 7 | aggccggagacaacccgtacctcaagtacaaccacgccgacgccgagttc |
| | | | caggagcggctcaaagaagatacgtcttttgggggcaacctcgggcgagc |
| | | | agtcttccaggccaaaaagaggcttcttgaacctcttggtctggttgagg |
| | | | aagcggctaagacggctcctggaaagaagaggcctgtagagcagtctcct |
| | | | caggaaccggactcctccgcgggtattggcaaatcgggtgcacagcccgc |
| | | | taaaaagagactcaatttcggtcagactggcgacacagagtcagtcccag |
| | | | accctcaaccaatcggagaacctcccgcagccccctcaggtgtgggatct |
| | | | cttacaatggcttcaggtggtggcgcaccagtggcagacaataacgaagg |
| | | | tgccgatggagtgggtagttcctcgggaaattggcattgcgattcccaat |
| | | | ggctgggggacagagtcatcaccaccagcacccgaacctgggccctgccc |
| | | | acctacaacaatcacctctacaagcaaatctccaacagcacatctggagg |
| | | | atcttcaaatgacaacgcctacttcggctacagcaccccctgggggtatt |
| | | | ttgacttcaacagattccactgccacttctcaccacgtgactggcagcga |
| | | | ctcatcaacaacaactggggattccggcctaagcgactcaacttcaagct |
| | | | cttcaacattcaggtcaaagaggttacggacaacaatggagtcaagacca |
| | | | tcgccaataaccttaccagcacggtccaggtcttcacggactcagactat |
| | | | cagctcccgtacgtgctcgggtcggctcacgagggctgcctcccgccgtt |
| | | | cccagcggacgttttcatgattcctcagtacgggtatctgacgcttaatg |
| | | | atggaagccaggccgtgggtcgttcgtccttttactgcctggaatatttc |
| | | | ccgtcgcaaatgctaagaacgggtaacaacttccagttcagctacgagtt |
| | | | tgagaacgtacctttccatagcagctacgctcacagccaaagcctggacc |
| | | | gactaatgaatccactcatcgaccaatacttgtactatctctcTaGAact |
| | | | attAACGGTTCTGGACAGAATCAAcaaacgctaaaattcagtgtggccgg |
| | | | acccagcaacatggctgtccagggaagaaactacatacctggacccagct |
| | | | accgacaacaacgtgtctcaaccactgtgactcaaaacaacaacagcgaa |
| | | | tttgcttggcctggagcttcttcttgggctctcaatggacgtaatagctt |
| | | | gatgaatcctggacctgctatggccagccacaaagaaggagaggaccgtt |
| | | | tctttcctttgtctggatctttaatttttggcaaacaaggTacCggCaga |
| | | | gacaacgtggatgcggacaaagtcatgataaccaacgaagaagaaattaa |
| | | | aactactaacccggtagcaacggagtcctatggacaagtggccacaaacc |
| | | | accagagtGCTCAAATACGCCAACCCCAGGAATTTGCCCAGGCCCAAacc |
| | | | ggttgggttcaaaaccaaggaatacttccgggtatggtttggcaggacag |
| | | | agatgtgtacctgcaaggacccatttgggccaaaattcctcacacggacg |
| | | | gcaactttcacccttctccgctgatgggagggtttggaatgaagcacccg |
| | | | cctcctcagatcctcatcaaaaacacacctgtacctgcggatcctccaac |
| | | | ggccttcaacaaggacaagctgaactctttcatcacccagtattctactg |
| | | | gccaagtcagcgtggagatcgagtgggagctgcagaaggaaaacagcaag |
| | | | cgctggaacccggagatccagtacacttccaactattacaagtctaataa |
| | | | tgttgaatttgctgttaatactgaaggtgtatatagtgaaccccgcccca |
| | | | ttggcaccagatacctgactcgtaatctg |
| 91 | DNA | Adeno- | atggctgccgatggttatcttccagattggctcgaggacaaccttagtga |
| | | Associated | aggaattcgcgagtggtgggctttgaaacctggagcccctcaacccaagg |
| | | Virus 9 | caaatcaacaacatcaagacaacgctcgaggtcttgtgcttccgggttac |
| | | comprising | aaataccttggacccggcaacggactcgacaagggggagccggtcaacgc |
| | | SEQ | agcagacgcggcggccctcgagcacgacaaggcctacgaccagcagctca |
| | | ID NO: 8 | aggccggagacaacccgtacctcaagtacaaccacgccgacgccgagttc |
| | | | caggagcggctcaaagaagatacgtcttttgggggcaacctcgggcgagc |
| | | | agtcttccaggccaaaaagaggcttcttgaacctcttggtctggttgagg |
| | | | aagcggctaagacggctcctggaaagaagaggcctgtagagcagtctcct |
| | | | caggaaccggactcctccgcgggtattggcaaatcgggtgcacagcccgc |
| | | | taaaaagagactcaatttcggtcagactggcgacacagagtcagtcccag |
| | | | accctcaaccaatcggagaacctcccgcagccccctcaggtgtgggatct |
| | | | cttacaatggcttcaggtggtggcgcaccagtggcagacaataacgaagg |
| | | | tgccgatggagtgggtagttcctcgggaaattggcattgcgattcccaat |
| | | | ggctgggggacagagtcatcaccaccagcacccgaacctgggccctgccc |
| | | | acctacaacaatcacctctacaagcaaatctccaacagcacatctggagg |
| | | | atcttcaaatgacaacgcctacttcggctacagcaccccctgggggtatt |
| | | | ttgacttcaacagattccactgccacttctcaccacgtgactggcagcga |
| | | | ctcatcaacaacaactggggattccggcctaagcgactcaacttcaagct |
| | | | cttcaacattcaggtcaaagaggttacggacaacaatggagtcaagacca |
| | | | tcgccaataaccttaccagcacggtccaggtcttcacggactcagactat |
| | | | cagctcccgtacgtgctcgggtcggctcacgagggctgcctcccgccgtt |
| | | | cccagcggacgttttcatgattcctcagtacgggtatctgacgcttaatg |
| | | | atggaagccaggccgtgggtcgttcgtccttttactgcctggaatatttc |
| | | | ccgtcgcaaatgctaagaacgggtaacaacttccagttcagctacgagtt |
| | | | tgagaacgtacctttccatagcagctacgctcacagccaaagcctggacc |
| | | | gactaatgaatccactcatcgaccaatacttgtactatctctcTaGAact |
| | | | attAACGGTTCTGGACAGAATCAAcaaacgctaaaattcagtgtggccgg |
| | | | acccagcaacatggctgtccagggaagaaactacatacctggacccagct |
| | | | accgacaacaacgtgtctcaaccactgtgactcaaaacaacaacagcgaa |
| | | | tttgcttggcctggagcttcttcttgggctctcaatggacgtaatagctt |
| | | | gatgaatcctggacctgctatggccagccacaaagaaggagaggaccgtt |
| | | | tctttcctttgtctggatctttaatttttggcaaacaaggTacCggCaga |
| | | | gacaacgtggatgcggacaaagtcatgataaccaacgaagaagaaattaa |
| | | | aactactaacccggtagcaacggagtcctatggacaagtggccacaaacc |
| | | | accagagtGCACAGATACGCGTACCGAACGAATTCGCGCAAGCTCAAacc |
| | | | ggttgggttcaaaaccaaggaatacttccgggtatggtttggcaggacag |
| | | | agatgtgtacctgcaaggacccatttgggccaaaattcctcacacggacg |
| | | | gcaactttcacccttctccgctgatgggagggtttggaatgaagcacccg |
| | | | cctcctcagatcctcatcaaaaacacacctgtacctgcggatcctccaac |
| | | | ggccttcaacaaggacaagctgaactctttcatcacccagtattctactg |
| | | | gccaagtcagcgtggagatcgagtgggagctgcagaaggaaaacagcaag |
| | | | cgctggaacccggagatccagtacacttccaactattacaagtctaataa |
| | | | tgttgaatttgctgttaatactgaaggtgtatatagtgaaccccgcccca |
| | | | ttggcaccagatacctgactcgtaatctg |
| 92 | DNA | Adeno- | atggctgccgatggttatcttccagattggctcgaggacaaccttagtga |
| | | Associated | aggaattcgcgagtggtgggctttgaaacctggagcccctcaacccaagg |
| | | Virus 9 | caaatcaacaacatcaagacaacgctcgaggtcttgtgcttccgggttac |
| | | comprising | aaataccttggacccggcaacggactcgacaagggggagccggtcaacgc |
| | | SEQ | agcagacgcggcggccctcgagcacgacaaggcctacgaccagcagctca |
| | | ID NO: 8 | aggccggagacaacccgtacctcaagtacaaccacgccgacgccgagttc |
| | | | caggagcggctcaaagaagatacgtcttttgggggcaacctcgggcgagc |
| | | | agtcttccaggccaaaaagaggcttcttgaacctcttggtctggttgagg |
| | | | aagcggctaagacggctcctggaaagaagaggcctgtagagcagtctcct |
| | | | caggaaccggactcctccgcgggtattggcaaatcgggtgcacagcccgc |
| | | | taaaaagagactcaatttcggtcagactggcgacacagagtcagtcccag |
| | | | accctcaaccaatcggagaacctcccgcagccccctcaggtgtgggatct |
| | | | cttacaatggcttcaggtggtggcgcaccagtggcagacaataacgaagg |
| | | | tgccgatggagtgggtagttcctcgggaaattggcattgcgattcccaat |
| | | | ggctgggggacagagtcatcaccaccagcacccgaacctgggccctgccc |
| | | | acctacaacaatcacctctacaagcaaatctccaacagcacatctggagg |
| | | | atcttcaaatgacaacgcctacttcggctacagcaccccctgggggtatt |
| | | | ttgacttcaacagattccactgccacttctcaccacgtgactggcagcga |
| | | | ctcatcaacaacaactggggattccggcctaagcgactcaacttcaagct |
| | | | cttcaacattcaggtcaaagaggttacggacaacaatggagtcaagacca |
| | | | tcgccaataaccttaccagcacggtccaggtcttcacggactcagactat |
| | | | cagctcccgtacgtgctcgggtcggctcacgagggctgcctcccgccgtt |
| | | | cccagcggacgttttcatgattcctcagtacgggtatctgacgcttaatg |
| | | | atggaagccaggccgtgggtcgttcgtccttttactgcctggaatatttc |
| | | | ccgtcgcaaatgctaagaacgggtaacaacttccagttcagctacgagtt |
| | | | tgagaacgtacctttccatagcagctacgctcacagccaaagcctggacc |
| | | | gactaatgaatccactcatcgaccaatacttgtactatctctcTaGAact |
| | | | attAACGGTTCTGGACAGAATCAAcaaacgctaaaattcagtgtggccgg |
| | | | acccagcaacatggctgtccagggaagaaactacatacctggacccagct |
| | | | accgacaacaacgtgtctcaaccactgtgactcaaaacaacaacagcgaa |
| | | | tttgcttggcctggagcttcttcttgggctctcaatggacgtaatagctt |
| | | | gatgaatcctggacctgctatggccagccacaaagaaggagaggaccgtt |
| | | | tctttcctttgtctggatctttaatttttggcaaacaaggTacCggCaga |
| | | | gacaacgtggatgcggacaaagtcatgataaccaacgaagaagaaattaa |
| | | | aactactaacccggtagcaacggagtcctatggacaagtggccacaaacc |
| | | | accagagtGCTCAAATAAGGGTCCCGAACGAGTTTGCGCAAGCTCAAacc |
| | | | ggttgggttcaaaaccaaggaatacttccgggtatggtttggcaggacag |
| | | | agatgtgtacctgcaaggacccatttgggccaaaattcctcacacggacg |
| | | | gcaactttcacccttctccgctgatgggagggtttggaatgaagcacccg |
| | | | cctcctcagatcctcatcaaaaacacacctgtacctgcggatcctccaac |
| | | | ggccttcaacaaggacaagctgaactctttcatcacccagtattctactg |
| | | | gccaagtcagcgtggagatcgagtgggagctgcagaaggaaaacagcaag |
| | | | cgctggaacccggagatccagtacacttccaactattacaagtctaataa |
| | | | tgttgaatttgctgttaatactgaaggtgtatatagtgaaccccgcccca |
| | | | ttggcaccagatacctgactcgtaatctg |
| 93 | DNA | Adeno- | atggctgccgatggttatcttccagattggctcgaggacaaccttagtga |
| | | Associated | aggaattcgcgagtggtgggctttgaaacctggagcccctcaacccaagg |
| | | Virus 9 | caaatcaacaacatcaagacaacgctcgaggtcttgtgcttccgggttac |
| | | comprising | aaataccttggacccggcaacggactcgacaagggggagccggtcaacgc |
| | | SEQ | agcagacgcggcggccctcgagcacgacaaggcctacgaccagcagctca |
| | | ID NO: 8 | aggccggagacaacccgtacctcaagtacaaccacgccgacgccgagttc |
| | | | caggagcggctcaaagaagatacgtcttttgggggcaacctcgggcgagc |
| | | | agtcttccaggccaaaaagaggcttcttgaacctcttggtctggttgagg |
| | | | aagcggctaagacggctcctggaaagaagaggcctgtagagcagtctcct |
| | | | caggaaccggactcctccgcgggtattggcaaatcgggtgcacagcccgc |
| | | | taaaaagagactcaatttcggtcagactggcgacacagagtcagtcccag |
| | | | accctcaaccaatcggagaacctcccgcagccccctcaggtgtgggatct |
| | | | cttacaatggcttcaggtggtggcgcaccagtggcagacaataacgaagg |
| | | | tgccgatggagtgggtagttcctcgggaaattggcattgcgattcccaat |
| | | | ggctgggggacagagtcatcaccaccagcacccgaacctgggccctgccc |
| | | | acctacaacaatcacctctacaagcaaatctccaacagcacatctggagg |
| | | | atcttcaaatgacaacgcctacttcggctacagcaccccctgggggtatt |
| | | | ttgacttcaacagattccactgccacttctcaccacgtgactggcagcga |
| | | | ctcatcaacaacaactggggattccggcctaagcgactcaacttcaagct |
| | | | cttcaacattcaggtcaaagaggttacggacaacaatggagtcaagacca |
| | | | tcgccaataaccttaccagcacggtccaggtcttcacggactcagactat |
| | | | cagctcccgtacgtgctcgggtcggctcacgagggctgcctcccgccgtt |
| | | | cccagcggacgttttcatgattcctcagtacgggtatctgacgcttaatg |
| | | | atggaagccaggccgtgggtcgttcgtccttttactgcctggaatatttc |
| | | | ccgtcgcaaatgctaagaacgggtaacaacttccagttcagctacgagtt |
| | | | tgagaacgtacctttccatagcagctacgctcacagccaaagcctggacc |
| | | | gactaatgaatccactcatcgaccaatacttgtactatctctcTaGAact |
| | | | attAACGGTTCTGGACAGAATCAAcaaacgctaaaattcagtgtggccgg |
| | | | acccagcaacatggctgtccagggaagaaactacatacctggacccagct |
| | | | accgacaacaacgtgtctcaaccactgtgactcaaaacaacaacagcgaa |
| | | | tttgcttggcctggagcttcttcttgggctctcaatggacgtaatagctt |
| | | | gatgaatcctggacctgctatggccagccacaaagaaggagaggaccgtt |
| | | | tctttcctttgtctggatctttaatttttggcaaacaaggTacCggCaga |
| | | | gacaacgtggatgcggacaaagtcatgataaccaacgaagaagaaattaa |
| | | | aactactaacccggtagcaacggagtcctatggacaagtggccacaaacc |
| | | | accagagtGCACAAATCAGGGTACCCAATGAATTTGCACAGGCTCAAacc |
| | | | ggttgggttcaaaaccaaggaatacttccgggtatggtttggcaggacag |
| | | | agatgtgtacctgcaaggacccatttgggccaaaattcctcacacggacg |
| | | | gcaactttcacccttctccgctgatgggagggtttggaatgaagcacccg |
| | | | cctcctcagatcctcatcaaaaacacacctgtacctgcggatcctccaac |
| | | | ggccttcaacaaggacaagctgaactctttcatcacccagtattctactg |
| | | | gccaagtcagcgtggagatcgagtgggagctgcagaaggaaaacagcaag |
| | | | cgctggaacccggagatccagtacacttccaactattacaagtctaataa |
| | | | tgttgaatttgctgttaatactgaaggtgtatatagtgaaccccgcccca |
| | | | ttggcaccagatacctgactcgtaatctg |
| 94 | DNA | Adeno- | atggctgccgatggttatcttccagattggctcgaggacaaccttagtga |
| | | Associated | aggaattcgcgagtggtgggctttgaaacctggagcccctcaacccaagg |
| | | Virus 9 | caaatcaacaacatcaagacaacgctcgaggtcttgtgcttccgggttac |
| | | comprising | aaataccttggacccggcaacggactcgacaagggggagccggtcaacgc |
| | | SEQ | agcagacgcggcggccctcgagcacgacaaggcctacgaccagcagctca |
| | | ID NO: 8 | aggccggagacaacccgtacctcaagtacaaccacgccgacgccgagttc |
| | | | caggagcggctcaaagaagatacgtcttttgggggcaacctcgggcgagc |
| | | | agtcttccaggccaaaaagaggcttcttgaacctcttggtctggttgagg |
| | | | aagcggctaagacggctcctggaaagaagaggcctgtagagcagtctcct |
| | | | caggaaccggactcctccgcgggtattggcaaatcgggtgcacagcccgc |
| | | | taaaaagagactcaatttcggtcagactggcgacacagagtcagtcccag |
| | | | accctcaaccaatcggagaacctcccgcagccccctcaggtgtgggatct |
| | | | cttacaatggcttcaggtggtggcgcaccagtggcagacaataacgaagg |
| | | | tgccgatggagtgggtagttcctcgggaaattggcattgcgattcccaat |
| | | | ggctgggggacagagtcatcaccaccagcacccgaacctgggccctgccc |
| | | | acctacaacaatcacctctacaagcaaatctccaacagcacatctggagg |
| | | | atcttcaaatgacaacgcctacttcggctacagcaccccctgggggtatt |
| | | | ttgacttcaacagattccactgccacttctcaccacgtgactggcagcga |
| | | | ctcatcaacaacaactggggattccggcctaagcgactcaacttcaagct |
| | | | cttcaacattcaggtcaaagaggttacggacaacaatggagtcaagacca |
| | | | tcgccaataaccttaccagcacggtccaggtcttcacggactcagactat |
| | | | cagctcccgtacgtgctcgggtcggctcacgagggctgcctcccgccgtt |
| | | | cccagcggacgttttcatgattcctcagtacgggtatctgacgcttaatg |
| | | | atggaagccaggccgtgggtcgttcgtccttttactgcctggaatatttc |
| | | | ccgtcgcaaatgctaagaacgggtaacaacttccagttcagctacgagtt |
| | | | tgagaacgtacctttccatagcagctacgctcacagccaaagcctggacc |
| | | | gactaatgaatccactcatcgaccaatacttgtactatctctcTaGAact |
| | | | attAACGGTTCTGGACAGAATCAAcaaacgctaaaattcagtgtggccgg |
| | | | acccagcaacatggctgtccagggaagaaactacatacctggacccagct |
| | | | accgacaacaacgtgtctcaaccactgtgactcaaaacaacaacagcgaa |
| | | | tttgcttggcctggagcttcttcttgggctctcaatggacgtaatagctt |
| | | | gatgaatcctggacctgctatggccagccacaaagaaggagaggaccgtt |
| | | | tctttcctttgtctggatctttaatttttggcaaacaaggTacCggCaga |
| | | | gacaacgtggatgcggacaaagtcatgataaccaacgaagaagaaattaa |
| | | | aactactaacccggtagcaacggagtcctatggacaagtggccacaaacc |
| | | | accagagtGCGCAGATCCGGGTGCCTAATGAATTCGCACAGGCACAGacc |
| | | | ggttgggttcaaaaccaaggaatacttccgggtatggtttggcaggacag |
| | | | agatgtgtacctgcaaggacccatttgggccaaaattcctcacacggacg |
| | | | gcaactttcacccttctccgctgatgggagggtttggaatgaagcacccg |
| | | | cctcctcagatcctcatcaaaaacacacctgtacctgcggatcctccaac |
| | | | ggccttcaacaaggacaagctgaactctttcatcacccagtattctactg |
| | | | gccaagtcagcgtggagatcgagtgggagctgcagaaggaaaacagcaag |
| | | | cgctggaacccggagatccagtacacttccaactattacaagtctaataa |
| | | | tgttgaatttgctgttaatactgaaggtgtatatagtgaaccccgcccca |
| | | | ttggcaccagatacctgactcgtaatctg |
| 95 | DNA | Adeno- | atggctgccgatggttatcttccagattggctcgaggacaaccttagtga |
| | | Associated | aggaattcgcgagtggtgggctttgaaacctggagcccctcaacccaagg |
| | | Virus 9 | caaatcaacaacatcaagacaacgctcgaggtcttgtgcttccgggttac |
| | | comprising | aaataccttggacccggcaacggactcgacaagggggagccggtcaacgc |
| | | SEQ | agcagacgcggcggccctcgagcacgacaaggcctacgaccagcagctca |
| | | ID NO: 8 | aggccggagacaacccgtacctcaagtacaaccacgccgacgccgagttc |
| | | | caggagcggctcaaagaagatacgtcttttgggggcaacctcgggcgagc |
| | | | agtcttccaggccaaaaagaggcttcttgaacctcttggtctggttgagg |
| | | | aagcggctaagacggctcctggaaagaagaggcctgtagagcagtctcct |
| | | | caggaaccggactcctccgcgggtattggcaaatcgggtgcacagcccgc |
| | | | taaaaagagactcaatttcggtcagactggcgacacagagtcagtcccag |
| | | | accctcaaccaatcggagaacctcccgcagccccctcaggtgtgggatct |
| | | | cttacaatggcttcaggtggtggcgcaccagtggcagacaataacgaagg |
| | | | tgccgatggagtgggtagttcctcgggaaattggcattgcgattcccaat |
| | | | ggctgggggacagagtcatcaccaccagcacccgaacctgggccctgccc |
| | | | acctacaacaatcacctctacaagcaaatctccaacagcacatctggagg |
| | | | atcttcaaatgacaacgcctacttcggctacagcaccccctgggggtatt |
| | | | ttgacttcaacagattccactgccacttctcaccacgtgactggcagcga |
| | | | ctcatcaacaacaactggggattccggcctaagcgactcaacttcaagct |
| | | | cttcaacattcaggtcaaagaggttacggacaacaatggagtcaagacca |
| | | | tcgccaataaccttaccagcacggtccaggtcttcacggactcagactat |
| | | | cagctcccgtacgtgctcgggtcggctcacgagggctgcctcccgccgtt |
| | | | cccagcggacgttttcatgattcctcagtacgggtatctgacgcttaatg |
| | | | atggaagccaggccgtgggtcgttcgtccttttactgcctggaatatttc |
| | | | ccgtcgcaaatgctaagaacgggtaacaacttccagttcagctacgagtt |
| | | | tgagaacgtacctttccatagcagctacgctcacagccaaagcctggacc |
| | | | gactaatgaatccactcatcgaccaatacttgtactatctctcTaGAact |
| | | | attAACGGTTCTGGACAGAATCAAcaaacgctaaaattcagtgtggccgg |
| | | | acccagcaacatggctgtccagggaagaaactacatacctggacccagct |
| | | | accgacaacaacgtgtctcaaccactgtgactcaaaacaacaacagcgaa |
| | | | tttgcttggcctggagcttcttcttgggctctcaatggacgtaatagctt |
| | | | gatgaatcctggacctgctatggccagccacaaagaaggagaggaccgtt |
| | | | tctttcctttgtctggatctttaatttttggcaaacaaggTacCggCaga |
| | | | gacaacgtggatgcggacaaagtcatgataaccaacgaagaagaaattaa |
| | | | aactactaacccggtagcaacggagtcctatggacaagtggccacaaacc |
| | | | accagagtGCGCAGATACGTGTGCCGAACGAGTTCGCCCAAGCACAGacc |
| | | | ggttgggttcaaaaccaaggaatacttccgggtatggtttggcaggacag |
| | | | agatgtgtacctgcaaggacccatttgggccaaaattcctcacacggacg |
| | | | gcaactttcacccttctccgctgatgggagggtttggaatgaagcacccg |
| | | | cctcctcagatcctcatcaaaaacacacctgtacctgcggatcctccaac |
| | | | ggccttcaacaaggacaagctgaactctttcatcacccagtattctactg |
| | | | gccaagtcagcgtggagatcgagtgggagctgcagaaggaaaacagcaag |
| | | | cgctggaacccggagatccagtacacttccaactattacaagtctaataa |
| | | | tgttgaatttgctgttaatactgaaggtgtatatagtgaaccccgcccca |
| | | | ttggcaccagatacctgactcgtaatctg |
| 96 | DNA | Adeno- | atggctgccgatggttatcttccagattggctcgaggacaaccttagtga |
| | | Associated | aggaattcgcgagtggtgggctttgaaacctggagcccctcaacccaagg |
| | | Virus 9 | caaatcaacaacatcaagacaacgctcgaggtcttgtgcttccgggttac |
| | | comprising | aaataccttggacccggcaacggactcgacaagggggagccggtcaacgc |
| | | SEQ | agcagacgcggcggccctcgagcacgacaaggcctacgaccagcagctca |
| | | ID NO: 8 | aggccggagacaacccgtacctcaagtacaaccacgccgacgccgagttc |
| | | | caggagcggctcaaagaagatacgtcttttgggggcaacctcgggcgagc |
| | | | agtcttccaggccaaaaagaggcttcttgaacctcttggtctggttgagg |
| | | | aagcggctaagacggctcctggaaagaagaggcctgtagagcagtctcct |
| | | | caggaaccggactcctccgcgggtattggcaaatcgggtgcacagcccgc |
| | | | taaaaagagactcaatttcggtcagactggcgacacagagtcagtcccag |
| | | | accctcaaccaatcggagaacctcccgcagccccctcaggtgtgggatct |
| | | | cttacaatggcttcaggtggtggcgcaccagtggcagacaataacgaagg |
| | | | tgccgatggagtgggtagttcctcgggaaattggcattgcgattcccaat |
| | | | ggctgggggacagagtcatcaccaccagcacccgaacctgggccctgccc |
| | | | acctacaacaatcacctctacaagcaaatctccaacagcacatctggagg |
| | | | atcttcaaatgacaacgcctacttcggctacagcaccccctgggggtatt |
| | | | ttgacttcaacagattccactgccacttctcaccacgtgactggcagcga |
| | | | ctcatcaacaacaactggggattccggcctaagcgactcaacttcaagct |
| | | | cttcaacattcaggtcaaagaggttacggacaacaatggagtcaagacca |
| | | | tcgccaataaccttaccagcacggtccaggtcttcacggactcagactat |
| | | | cagctcccgtacgtgctcgggtcggctcacgagggctgcctcccgccgtt |
| | | | cccagcggacgttttcatgattcctcagtacgggtatctgacgcttaatg |
| | | | atggaagccaggccgtgggtcgttcgtccttttactgcctggaatatttc |
| | | | ccgtcgcaaatgctaagaacgggtaacaacttccagttcagctacgagtt |
| | | | tgagaacgtacctttccatagcagctacgctcacagccaaagcctggacc |
| | | | gactaatgaatccactcatcgaccaatacttgtactatctctcTaGAact |
| | | | attAACGGTTCTGGACAGAATCAAcaaacgctaaaattcagtgtggccgg |
| | | | acccagcaacatggctgtccagggaagaaactacatacctggacccagct |
| | | | accgacaacaacgtgtctcaaccactgtgactcaaaacaacaacagcgaa |
| | | | tttgcttggcctggagcttcttcttgggctctcaatggacgtaatagctt |
| | | | gatgaatcctggacctgctatggccagccacaaagaaggagaggaccgtt |
| | | | tctttcctttgtctggatctttaatttttggcaaacaaggTacCggCaga |
| | | | gacaacgtggatgcggacaaagtcatgataaccaacgaagaagaaattaa |
| | | | aactactaacccggtagcaacggagtcctatggacaagtggccacaaacc |
| | | | accagagtGCGCAAATAAGAGTACCGAATGAGTTCGCCCAAGCCCAGacc |
| | | | ggttgggttcaaaaccaaggaatacttccgggtatggtttggcaggacag |
| | | | agatgtgtacctgcaaggacccatttgggccaaaattcctcacacggacg |
| | | | gcaactttcacccttctccgctgatgggagggtttggaatgaagcacccg |
| | | | cctcctcagatcctcatcaaaaacacacctgtacctgcggatcctccaac |
| | | | ggccttcaacaaggacaagctgaactctttcatcacccagtattctactg |
| | | | gccaagtcagcgtggagatcgagtgggagctgcagaaggaaaacagcaag |
| | | | cgctggaacccggagatccagtacacttccaactattacaagtctaataa |
| | | | tgttgaatttgctgttaatactgaaggtgtatatagtgaaccccgcccca |
| | | | ttggcaccagatacctgactcgtaatctg |
| 97 | DNA | Adeno- | atggctgccgatggttatcttccagattggctcgaggacaaccttagtga |
| | | Associated | aggaattcgcgagtggtgggctttgaaacctggagcccctcaacccaagg |
| | | Virus 9 | caaatcaacaacatcaagacaacgctcgaggtcttgtgcttccgggttac |
| | | comprising | aaataccttggacccggcaacggactcgacaagggggagccggtcaacgc |
| | | SEQ | agcagacgcggcggccctcgagcacgacaaggcctacgaccagcagctca |
| | | ID NO: 8 | aggccggagacaacccgtacctcaagtacaaccacgccgacgccgagttc |
| | | | caggagcggctcaaagaagatacgtcttttgggggcaacctcgggcgagc |
| | | | agtcttccaggccaaaaagaggcttcttgaacctcttggtctggttgagg |
| | | | aagcggctaagacggctcctggaaagaagaggcctgtagagcagtctcct |
| | | | caggaaccggactcctccgcgggtattggcaaatcgggtgcacagcccgc |
| | | | taaaaagagactcaatttcggtcagactggcgacacagagtcagtcccag |
| | | | accctcaaccaatcggagaacctcccgcagccccctcaggtgtgggatct |
| | | | cttacaatggcttcaggtggtggcgcaccagtggcagacaataacgaagg |
| | | | tgccgatggagtgggtagttcctcgggaaattggcattgcgattcccaat |
| | | | ggctgggggacagagtcatcaccaccagcacccgaacctgggccctgccc |
| | | | acctacaacaatcacctctacaagcaaatctccaacagcacatctggagg |
| | | | atcttcaaatgacaacgcctacttcggctacagcaccccctgggggtatt |
| | | | ttgacttcaacagattccactgccacttctcaccacgtgactggcagcga |
| | | | ctcatcaacaacaactggggattccggcctaagcgactcaacttcaagct |
| | | | cttcaacattcaggtcaaagaggttacggacaacaatggagtcaagacca |
| | | | tcgccaataaccttaccagcacggtccaggtcttcacggactcagactat |
| | | | cagctcccgtacgtgctcgggtcggctcacgagggctgcctcccgccgtt |
| | | | cccagcggacgttttcatgattcctcagtacgggtatctgacgcttaatg |
| | | | atggaagccaggccgtgggtcgttcgtccttttactgcctggaatatttc |
| | | | ccgtcgcaaatgctaagaacgggtaacaacttccagttcagctacgagtt |
| | | | tgagaacgtacctttccatagcagctacgctcacagccaaagcctggacc |
| | | | gactaatgaatccactcatcgaccaatacttgtactatctctcTaGAact |
| | | | attAACGGTTCTGGACAGAATCAAcaaacgctaaaattcagtgtggccgg |
| | | | acccagcaacatggctgtccagggaagaaactacatacctggacccagct |
| | | | accgacaacaacgtgtctcaaccactgtgactcaaaacaacaacagcgaa |
| | | | tttgcttggcctggagcttcttcttgggctctcaatggacgtaatagctt |
| | | | gatgaatcctggacctgctatggccagccacaaagaaggagaggaccgtt |
| | | | tctttcctttgtctggatctttaatttttggcaaacaaggTacCggCaga |
| | | | gacaacgtggatgcggacaaagtcatgataaccaacgaagaagaaattaa |
| | | | aactactaacccggtagcaacggagtcctatggacaagtggccacaaacc |
| | | | accagagtGCCCAAATCCGAGTGCCAAACGAGTTTGCTCAGGCACAGacc |
| | | | ggttgggttcaaaaccaaggaatacttccgggtatggtttggcaggacag |
| | | | agatgtgtacctgcaaggacccatttgggccaaaattcctcacacggacg |
| | | | gcaactttcacccttctccgctgatgggagggtttggaatgaagcacccg |
| | | | cctcctcagatcctcatcaaaaacacacctgtacctgcggatcctccaac |
| | | | ggccttcaacaaggacaagctgaactctttcatcacccagtattctactg |
| | | | gccaagtcagcgtggagatcgagtgggagctgcagaaggaaaacagcaag |
| | | | cgctggaacccggagatccagtacacttccaactattacaagtctaataa |
| | | | tgttgaatttgctgttaatactgaaggtgtatatagtgaaccccgcccca |
| | | | ttggcaccagatacctgactcgtaatctg |
| 98 | DNA | Adeno- | atggctgccgatggttatcttccagattggctcgaggacaaccttagtga |
| | | Associated | aggaattcgcgagtggtgggctttgaaacctggagcccctcaacccaagg |
| | | Virus 9 | caaatcaacaacatcaagacaacgctcgaggtcttgtgcttccgggttac |
| | | comprising | aaataccttggacccggcaacggactcgacaagggggagccggtcaacgc |
| | | SEQ | agcagacgcggcggccctcgagcacgacaaggcctacgaccagcagctca |
| | | ID NO: 8 | aggccggagacaacccgtacctcaagtacaaccacgccgacgccgagttc |
| | | | caggagcggctcaaagaagatacgtcttttgggggcaacctcgggcgagc |
| | | | agtcttccaggccaaaaagaggcttcttgaacctcttggtctggttgagg |
| | | | aagcggctaagacggctcctggaaagaagaggcctgtagagcagtctcct |
| | | | caggaaccggactcctccgcgggtattggcaaatcgggtgcacagcccgc |
| | | | taaaaagagactcaatttcggtcagactggcgacacagagtcagtcccag |
| | | | accctcaaccaatcggagaacctcccgcagccccctcaggtgtgggatct |
| | | | cttacaatggcttcaggtggtggcgcaccagtggcagacaataacgaagg |
| | | | tgccgatggagtgggtagttcctcgggaaattggcattgcgattcccaat |
| | | | ggctgggggacagagtcatcaccaccagcacccgaacctgggccctgccc |
| | | | acctacaacaatcacctctacaagcaaatctccaacagcacatctggagg |
| | | | atcttcaaatgacaacgcctacttcggctacagcaccccctgggggtatt |
| | | | ttgacttcaacagattccactgccacttctcaccacgtgactggcagcga |
| | | | ctcatcaacaacaactggggattccggcctaagcgactcaacttcaagct |
| | | | cttcaacattcaggtcaaagaggttacggacaacaatggagtcaagacca |
| | | | tcgccaataaccttaccagcacggtccaggtcttcacggactcagactat |
| | | | cagctcccgtacgtgctcgggtcggctcacgagggctgcctcccgccgtt |
| | | | cccagcggacgttttcatgattcctcagtacgggtatctgacgcttaatg |
| | | | atggaagccaggccgtgggtcgttcgtccttttactgcctggaatatttc |
| | | | ccgtcgcaaatgctaagaacgggtaacaacttccagttcagctacgagtt |
| | | | tgagaacgtacctttccatagcagctacgctcacagccaaagcctggacc |
| | | | gactaatgaatccactcatcgaccaatacttgtactatctctcTaGAact |
| | | | attAACGGTTCTGGACAGAATCAAcaaacgctaaaattcagtgtggccgg |
| | | | acccagcaacatggctgtccagggaagaaactacatacctggacccagct |
| | | | accgacaacaacgtgtctcaaccactgtgactcaaaacaacaacagcgaa |
| | | | tttgcttggcctggagcttcttcttgggctctcaatggacgtaatagctt |
| | | | gatgaatcctggacctgctatggccagccacaaagaaggagaggaccgtt |
| | | | tctttcctttgtctggatctttaatttttggcaaacaaggTacCggCaga |
| | | | gacaacgtggatgcggacaaagtcatgataaccaacgaagaagaaattaa |
| | | | aactactaacccggtagcaacggagtcctatggacaagtggccacaaacc |
| | | | accagagtGCTCAAATCCGAGTCCCTAATGAGTTTGCCCAGGCGCAGacc |
| | | | ggttgggttcaaaaccaaggaatacttccgggtatggtttggcaggacag |
| | | | agatgtgtacctgcaaggacccatttgggccaaaattcctcacacggacg |
| | | | gcaactttcacccttctccgctgatgggagggtttggaatgaagcacccg |
| | | | cctcctcagatcctcatcaaaaacacacctgtacctgcggatcctccaac |
| | | | ggccttcaacaaggacaagctgaactctttcatcacccagtattctactg |
| | | | gccaagtcagcgtggagatcgagtgggagctgcagaaggaaaacagcaag |
| | | | cgctggaacccggagatccagtacacttccaactattacaagtctaataa |
| | | | tgttgaatttgctgttaatactgaaggtgtatatagtgaaccccgcccca |
| | | | ttggcaccagatacctgactcgtaatctg |
| 99 | DNA | Adeno- | atggctgccgatggttatcttccagattggctcgaggacaaccttagtga |
| | | Associated | aggaattcgcgagtggtgggctttgaaacctggagcccctcaacccaagg |
| | | Virus 9 | caaatcaacaacatcaagacaacgctcgaggtcttgtgcttccgggttac |
| | | comprising | aaataccttggacccggcaacggactcgacaagggggagccggtcaacgc |
| | | SEQ | agcagacgcggcggccctcgagcacgacaaggcctacgaccagcagctca |
| | | ID NO: 8 | aggccggagacaacccgtacctcaagtacaaccacgccgacgccgagttc |
| | | | caggagcggctcaaagaagatacgtcttttgggggcaacctcgggcgagc |
| | | | agtcttccaggccaaaaagaggcttcttgaacctcttggtctggttgagg |
| | | | aagcggctaagacggctcctggaaagaagaggcctgtagagcagtctcct |
| | | | caggaaccggactcctccgcgggtattggcaaatcgggtgcacagcccgc |
| | | | taaaaagagactcaatttcggtcagactggcgacacagagtcagtcccag |
| | | | accctcaaccaatcggagaacctcccgcagccccctcaggtgtgggatct |
| | | | cttacaatggcttcaggtggtggcgcaccagtggcagacaataacgaagg |
| | | | tgccgatggagtgggtagttcctcgggaaattggcattgcgattcccaat |
| | | | ggctgggggacagagtcatcaccaccagcacccgaacctgggccctgccc |
| | | | acctacaacaatcacctctacaagcaaatctccaacagcacatctggagg |
| | | | atcttcaaatgacaacgcctacttcggctacagcaccccctgggggtatt |
| | | | ttgacttcaacagattccactgccacttctcaccacgtgactggcagcga |
| | | | ctcatcaacaacaactggggattccggcctaagcgactcaacttcaagct |
| | | | cttcaacattcaggtcaaagaggttacggacaacaatggagtcaagacca |
| | | | tcgccaataaccttaccagcacggtccaggtcttcacggactcagactat |
| | | | cagctcccgtacgtgctcgggtcggctcacgagggctgcctcccgccgtt |
| | | | cccagcggacgttttcatgattcctcagtacgggtatctgacgcttaatg |
| | | | atggaagccaggccgtgggtcgttcgtccttttactgcctggaatatttc |
| | | | ccgtcgcaaatgctaagaacgggtaacaacttccagttcagctacgagtt |
| | | | tgagaacgtacctttccatagcagctacgctcacagccaaagcctggacc |
| | | | gactaatgaatccactcatcgaccaatacttgtactatctctcTaGAact |
| | | | attAACGGTTCTGGACAGAATCAAcaaacgctaaaattcagtgtggccgg |
| | | | acccagcaacatggctgtccagggaagaaactacatacctggacccagct |
| | | | accgacaacaacgtgtctcaaccactgtgactcaaaacaacaacagcgaa |
| | | | tttgcttggcctggagcttcttcttgggctctcaatggacgtaatagctt |
| | | | gatgaatcctggacctgctatggccagccacaaagaaggagaggaccgtt |
| | | | tctttcctttgtctggatctttaatttttggcaaacaaggTacCggCaga |
| | | | gacaacgtggatgcggacaaagtcatgataaccaacgaagaagaaattaa |
| | | | aactactaacccggtagcaacggagtcctatggacaagtggccacaaacc |
| | | | accagagtGCACAGATAAGGGTACCCAATGAATTCGCGCAAGCGCAAacc |
| | | | ggttgggttcaaaaccaaggaatacttccgggtatggtttggcaggacag |
| | | | agatgtgtacctgcaaggacccatttgggccaaaattcctcacacggacg |
| | | | gcaactttcacccttctccgctgatgggagggtttggaatgaagcacccg |
| | | | cctcctcagatcctcatcaaaaacacacctgtacctgcggatcctccaac |
| | | | ggccttcaacaaggacaagctgaactctttcatcacccagtattctactg |
| | | | gccaagtcagcgtggagatcgagtgggagctgcagaaggaaaacagcaag |
| | | | cgctggaacccggagatccagtacacttccaactattacaagtctaataa |
| | | | tgttgaatttgctgttaatactgaaggtgtatatagtgaaccccgcccca |
| | | | ttggcaccagatacctgactcgtaatctg |
| 100 | DNA | Adeno- | atggctgccgatggttatcttccagattggctcgaggacaaccttagtga |
| | | Associated | aggaattcgcgagtggtgggctttgaaacctggagcccctcaacccaagg |
| | | Virus 9 | caaatcaacaacatcaagacaacgctcgaggtcttgtgcttccgggttac |
| | | comprising | aaataccttggacccggcaacggactcgacaagggggagccggtcaacgc |
| | | SEQ | agcagacgcggcggccctcgagcacgacaaggcctacgaccagcagctca |
| | | ID NO: 8 | aggccggagacaacccgtacctcaagtacaaccacgccgacgccgagttc |
| | | | caggagcggctcaaagaagatacgtcttttgggggcaacctcgggcgagc |
| | | | agtcttccaggccaaaaagaggcttcttgaacctcttggtctggttgagg |
| | | | aagcggctaagacggctcctggaaagaagaggcctgtagagcagtctcct |
| | | | caggaaccggactcctccgcgggtattggcaaatcgggtgcacagcccgc |
| | | | taaaaagagactcaatttcggtcagactggcgacacagagtcagtcccag |
| | | | accctcaaccaatcggagaacctcccgcagccccctcaggtgtgggatct |
| | | | cttacaatggcttcaggtggtggcgcaccagtggcagacaataacgaagg |
| | | | tgccgatggagtgggtagttcctcgggaaattggcattgcgattcccaat |
| | | | ggctgggggacagagtcatcaccaccagcacccgaacctgggccctgccc |
| | | | acctacaacaatcacctctacaagcaaatctccaacagcacatctggagg |
| | | | atcttcaaatgacaacgcctacttcggctacagcaccccctgggggtatt |
| | | | ttgacttcaacagattccactgccacttctcaccacgtgactggcagcga |
| | | | ctcatcaacaacaactggggattccggcctaagcgactcaacttcaagct |
| | | | cttcaacattcaggtcaaagaggttacggacaacaatggagtcaagacca |
| | | | tcgccaataaccttaccagcacggtccaggtcttcacggactcagactat |
| | | | cagctcccgtacgtgctcgggtcggctcacgagggctgcctcccgccgtt |
| | | | cccagcggacgttttcatgattcctcagtacgggtatctgacgcttaatg |
| | | | atggaagccaggccgtgggtcgttcgtccttttactgcctggaatatttc |
| | | | ccgtcgcaaatgctaagaacgggtaacaacttccagttcagctacgagtt |
| | | | tgagaacgtacctttccatagcagctacgctcacagccaaagcctggacc |
| | | | gactaatgaatccactcatcgaccaatacttgtactatctctcTaGAact |
| | | | attAACGGTTCTGGACAGAATCAAcaaacgctaaaattcagtgtggccgg |
| | | | acccagcaacatggctgtccagggaagaaactacatacctggacccagct |
| | | | accgacaacaacgtgtctcaaccactgtgactcaaaacaacaacagcgaa |
| | | | tttgcttggcctggagcttcttcttgggctctcaatggacgtaatagctt |
| | | | gatgaatcctggacctgctatggccagccacaaagaaggagaggaccgtt |
| | | | tctttcctttgtctggatctttaatttttggcaaacaaggTacCggCaga |
| | | | gacaacgtggatgcggacaaagtcatgataaccaacgaagaagaaattaa |
| | | | aactactaacccggtagcaacggagtcctatggacaagtggccacaaacc |
| | | | accagagtGCTCAGATTCGAGTGCCCAACGAATTTGCGCAGGCGCAAacc |
| | | | ggttgggttcaaaaccaaggaatacttccgggtatggtttggcaggacag |
| | | | agatgtgtacctgcaaggacccatttgggccaaaattcctcacacggacg |
| | | | gcaactttcacccttctccgctgatgggagggtttggaatgaagcacccg |
| | | | cctcctcagatcctcatcaaaaacacacctgtacctgcggatcctccaac |
| | | | ggccttcaacaaggacaagctgaactctttcatcacccagtattctactg |
| | | | gccaagtcagcgtggagatcgagtgggagctgcagaaggaaaacagcaag |
| | | | cgctggaacccggagatccagtacacttccaactattacaagtctaataa |
| | | | tgttgaatttgctgttaatactgaaggtgtatatagtgaaccccgcccca |
| | | | ttggcaccagatacctgactcgtaatctg |
| 101 | DNA | Adeno- | atggctgccgatggttatcttccagattggctcgaggacaaccttagtga |
| | | Associated | aggaattcgcgagtggtgggctttgaaacctggagcccctcaacccaagg |
| | | Virus 9 | caaatcaacaacatcaagacaacgctcgaggtcttgtgcttccgggttac |
| | | comprising | aaataccttggacccggcaacggactcgacaagggggagccggtcaacgc |
| | | SEQ | agcagacgcggcggccctcgagcacgacaaggcctacgaccagcagctca |
| | | ID NO: 9 | aggrcggagacaacccgtacctcaagtacaaccacgccgacgccgagttc |
| | | | caggagcggctcaaagaagatacgtcttttgggggcaacctcgggcgagc |
| | | | agtcttccaggccaaaaagaggcttcttgaacctcttggtctggttgagg |
| | | | aagcggctaagacggctcctggaaagaagaggcctgtagagcagtctcct |
| | | | caggaaccggactcctccgcgggtattggcaaatcgggtgcacagcccgc |
| | | | taaaaagagactcaatttcggtcagactggcgacacagagtcagtcccag |
| | | | accctcaaccaatcggagaacctcccgcagccccctcaggtgtgggatct |
| | | | cttacaatggcttcaggtggtggcgcaccagtggcagacaataacgaagg |
| | | | tgccgatggagtgggtagttcctcgggaaattggcattgcgattcccaat |
| | | | ggctgggggacagagtcatcaccaccagcacccgaacctgggccctgccc |
| | | | acctacaacaatcacctctacaagcaaatctccaacagcacatctggagg |
| | | | atcttcaaatgacaacgcctacttcggctacagcaccccctgggggtatt |
| | | | ttgacttcaacagattccactgccacttctcaccacgtgactggcagcga |
| | | | ctcatcaacaacaactggggattccggcctaagcgactcaacttcaagct |
| | | | cttcaacattcaggtcaaagaggttacggacaacaatggagtcaagacca |
| | | | tcgccaataaccttaccagcacggtccaggtcttcacggactcagactat |
| | | | cagctcccgtacgtgctcgggtcggctcacgagggctgcctcccgccgtt |
| | | | cccagcggacgttttcatgattcctcagtacgggtatctgacgcttaatg |
| | | | atggaagccaggccgtgggtcgttcgtccttttactgcctggaatatttc |
| | | | ccgtcgcaaatgctaagaacgggtaacaacttccagttcagctacgagtt |
| | | | tgagaacgtacctttccatagcagctacgctcacagccaaagcctggacc |
| | | | gactaatgaatccactcatcgaccaatacttgtactatctctcTaGAact |
| | | | attAACGGTTCTGGACAGAATCAAcaaacgctaaaattcagtgtggccgg |
| | | | acccagcaacatggctgtccagggaagaaactacatacctggacccagct |
| | | | accgacaacaacgtgtctcaaccactgtgactcaaaacaacaacagcgaa |
| | | | tttgcttggcctggagcttcttcttgggctctcaatggacgtaatagctt |
| | | | gatgaatcctggacctgctatggccagccacaaagaaggagaggaccgtt |
| | | | tctttcctttgtctggatctttaatttttggcaaacaaggTacCggCaga |
| | | | gacaacgtggatgcggacaaagtcatgataaccaacgaagaagaaattaa |
| | | | aactactaacccggtagcaacggagtcctatggacaagtggccacaaacc |
| | | | accagagtGCCCAAAAAGGCCCGGGATACGAACACGCACAGGCACAAacc |
| | | | ggttgggttcaaaaccaaggaatacttccgggtatggtttggcaggacag |
| | | | agatgtgtacctgcaaggacccatttgggccaaaattcctcacacggacg |
| | | | gcaactttcacccttctccgctgatgggagggtttggaatgaagcacccg |
| | | | cctcctcagatcctcatcaaaaacacacctgtacctgcggatcctccaac |
| | | | ggccttcaacaaggacaagctgaactctttcatcacccagtattctactg |
| | | | gccaagtcagcgtggagatcgagtgggagctgcagaaggaaaacagcaag |
| | | | cgctggaacccggagatccagtacacttccaactattacaagtctaataa |
| | | | tgttgaatttgctgttaatactgaaggtgtatatagtgaaccccgcccca |
| | | | ttggcaccagatacctgactcgtaatctg |
| 102 | DNA | Adeno- | atggctgccgatggttatcttccagattggctcgaggacaaccttagtga |
| | | Associated | aggaattcgcgagtggtgggctttgaaacctggagcccctcaacccaagg |
| | | Virus 9 | caaatcaacaacatcaagacaacgctcgaggtcttgtgcttccgggttac |
| | | comprising | aaataccttggacccggcaacggactcgacaagggggagccggtcaacgc |
| | | SEQ | agcagacgcggcggccctcgagcacgacaaggcctacgaccagcagctca |
| | | ID NO: 9 | aggccggagacaacccgtacctcaagtacaaccacgccgacgccgagttc |
| | | | caggagcggctcaaagaagatacgtcttttgggggcaacctcgggcgagc |
| | | | agtcttccaggccaaaaagaggcttcttgaacctcttggtctggttgagg |
| | | | aagcggctaagacggctcctggaaagaagaggcctgtagagcagtctcct |
| | | | caggaaccggactcctccgcgggtattggcaaatcgggtgcacagcccgc |
| | | | taaaaagagactcaatttcggtcagactggcgacacagagtcagtcccag |
| | | | accctcaaccaatcggagaacctcccgcagccccctcaggtgtgggatct |
| | | | cttacaatggcttcaggtggtggcgcaccagtggcagacaataacgaagg |
| | | | tgccgatggagtgggtagttcctcgggaaattggcattgcgattcccaat |
| | | | ggctgggggacagagtcatcaccaccagcacccgaacctgggccctgccc |
| | | | acctacaacaatcacctctacaagcaaatctccaacagcacatctggagg |
| | | | atcttcaaatgacaacgcctacttcggctacagcaccccctgggggtatt |
| | | | ttgacttcaacagattccactgccacttctcaccacgtgactggcagcga |
| | | | ctcatcaacaacaactggggattccggcctaagcgactcaacttcaagct |
| | | | cttcaacattcaggtcaaagaggttacggacaacaatggagtcaagacca |
| | | | tcgccaataaccttaccagcacggtccaggtcttcacggactcagactat |
| | | | cagctcccgtacgtgctcgggtcggctcacgagggctgcctcccgccgtt |
| | | | cccagcggacgttttcatgattcctcagtacgggtatctgacgcttaatg |
| | | | atggaagccaggccgtgggtcgttcgtccttttactgcctggaatatttc |
| | | | ccgtcgcaaatgctaagaacgggtaacaacttccagttcagctacgagtt |
| | | | tgagaacgtacctttccatagcagctacgctcacagccaaagcctggacc |
| | | | gactaatgaatccactcatcgaccaatacttgtactatctctcTaGAact |
| | | | attAACGGTTCTGGACAGAATCAAcaaacgctaaaattcagtgtggccgg |
| | | | acccagcaacatggctgtccagggaagaaactacatacctggacccagct |
| | | | accgacaacaacgtgtctcaaccactgtgactcaaaacaacaacagcgaa |
| | | | tttgcttggcctggagcttcttcttgggctctcaatggacgtaatagctt |
| | | | gatgaatcctggacctgctatggccagccacaaagaaggagaggaccgtt |
| | | | tctttcctttgtctggatctttaatttttggcaaacaaggTacCggCaga |
| | | | gacaacgtggatgcggacaaagtcatgataaccaacgaagaagaaattaa |
| | | | aactactaacccggtagcaacggagtcctatggacaagtggccacaaacc |
| | | | accagagtGCCCAAAAAGGGCCAGGTTACGAACATGCTCAGGCACAAacc |
| | | | ggttgggttcaaaaccaaggaatacttccgggtatggtttggcaggacag |
| | | | agatgtgtacctgcaaggacccatttgggccaaaattcctcacacggacg |
| | | | gcaactttcacccttctccgctgatgggagggtttggaatgaagcacccg |
| | | | cctcctcagatcctcatcaaaaacacacctgtacctgcggatcctccaac |
| | | | ggccttcaacaaggacaagctgaactctttcatcacccagtattctactg |
| | | | gccaagtcagcgtggagatcgagtgggagctgcagaaggaaaacagcaag |
| | | | cgctggaacccggagatccagtacacttccaactattacaagtctaataa |
| | | | tgttgaatttgctgttaatactgaaggtgtatatagtgaaccccgcccca |
| | | | ttggcaccagatacctgactcgtaatctg |
| 103 | DNA | Adeno- | atggctgccgatggttatcttccagattggctcgaggacaaccttagtga |
| | | Associated | aggaattcgcgagtggtgggctttgaaacctggagcccctcaacccaagg |
| | | Virus 9 | caaatcaacaacatcaagacaacgctcgaggtcttgtgcttccgggttac |
| | | comprising | aaataccttggacccggcaacggactcgacaagggggagccggtcaacgc |
| | | SEQ | agcagacgcggcggccctcgagcacgacaaggcctacgaccagcagctca |
| | | ID NO: 9 | aggccggagacaacccgtacctcaagtacaaccacgccgacgccgagttc |
| | | | caggagcggctcaaagaagatacgtcttttgggggcaacctcgggcgagc |
| | | | agtcttccaggccaaaaagaggcttcttgaacctcttggtctggttgagg |
| | | | aagcggctaagacggctcctggaaagaagaggcctgtagagcagtctcct |
| | | | caggaaccggactcctccgcgggtattggcaaatcgggtgcacagcccgc |
| | | | taaaaagagactcaatttcggtcagactggcgacacagagtcagtcccag |
| | | | accctcaaccaatcggagaacctcccgcagccccctcaggtgtgggatct |
| | | | cttacaatggcttcaggtggtggcgcaccagtggcagacaataacgaagg |
| | | | tgccgatggagtgggtagttcctcgggaaattggcattgcgattcccaat |
| | | | ggctgggggacagagtcatcaccaccagcacccgaacctgggccctgccc |
| | | | acctacaacaatcacctctacaagcaaatctccaacagcacatctggagg |
| | | | atcttcaaatgacaacgcctacttcggctacagcaccccctgggggtatt |
| | | | ttgacttcaacagattccactgccacttctcaccacgtgactggcagcga |
| | | | ctcatcaacaacaactggggattccggcctaagcgactcaacttcaagct |
| | | | cttcaacattcaggtcaaagaggttacggacaacaatggagtcaagacca |
| | | | tcgccaataaccttaccagcacggtccaggtcttcacggactcagactat |
| | | | cagctcccgtacgtgctcgggtcggctcacgagggctgcctcccgccgtt |
| | | | cccagcggacgttttcatgattcctcagtacgggtatctgacgcttaatg |
| | | | atggaagccaggccgtgggtcgttcgtccttttactgcctggaatatttc |
| | | | ccgtcgcaaatgctaagaacgggtaacaacttccagttcagctacgagtt |
| | | | tgagaacgtacctttccatagcagctacgctcacagccaaagcctggacc |
| | | | gactaatgaatccactcatcgaccaatacttgtactatctctcTaGAact |
| | | | attAACGGTTCTGGACAGAATCAAcaaacgctaaaattcagtgtggccgg |
| | | | acccagcaacatggctgtccagggaagaaactacatacctggacccagct |
| | | | accgacaacaacgtgtctcaaccactgtgactcaaaacaacaacagcgaa |
| | | | tttgcttggcctggagcttcttcttgggctctcaatggacgtaatagctt |
| | | | gatgaatcctggacctgctatggccagccacaaagaaggagaggaccgtt |
| | | | tctttcctttgtctggatctttaatttttggcaaacaaggTacCggCaga |
| | | | gacaacgtggatgcggacaaagtcatgataaccaacgaagaagaaattaa |
| | | | aactactaacccggtagcaacggagtcctatggacaagtggccacaaacc |
| | | | accagagtGCTCAAAAGGGGCCAGGATACGAGCATGCGCAGGCCCAAacc |
| | | | ggttgggttcaaaaccaaggaatacttccgggtatggtttggcaggacag |
| | | | agatgtgtacctgcaaggacccatttgggccaaaattcctcacacggacg |
| | | | gcaactttcacccttctccgctgatgggagggtttggaatgaagcacccg |
| | | | cctcctcagatcctcatcaaaaacacacctgtacctgcggatcctccaac |
| | | | ggccttcaacaaggacaagctgaactctttcatcacccagtattctactg |
| | | | gccaagtcagcgtggagatcgagtgggagctgcagaaggaaaacagcaag |
| | | | cgctggaacccggagatccagtacacttccaactattacaagtctaataa |
| | | | tgttgaatttgctgttaatactgaaggtgtatatagtgaaccccgcccca |
| | | | ttggcaccagatacctgactcgtaatctg |
| 104 | DNA | Adeno- | atggctgccgatggttatcttccagattggctcgaggacaaccttagtga |
| | | Associated | aggaattcgcgagtggtgggctttgaaacctggagcccctcaacccaagg |
| | | Virus 9 | caaatcaacaacatcaagacaacgctcgaggtcttgtgcttccgggttac |
| | | comprising | aaataccttggacccggcaacggactcgacaagggggagccggtcaacgc |
| | | SEQ | agcagacgcggcggccctcgagcacgacaaggcctacgaccagcagctca |
| | | ID NO: 9 | aggccggagacaacccgtacctcaagtacaaccacgccgacgccgagttc |
| | | | caggagcggctcaaagaagatacgtcttttgggggcaacctcgggcgagc |
| | | | agtcttccaggccaaaaagaggcttcttgaacctcttggtctggttgagg |
| | | | aagcggctaagacggctcctggaaagaagaggcctgtagagcagtctcct |
| | | | caggaaccggactcctccgcgggtattggcaaatcgggtgcacagcccgc |
| | | | taaaaagagactcaatttcggtcagactggcgacacagagtcagtcccag |
| | | | accctcaaccaatcggagaacctcccgcagccccctcaggtgtgggatct |
| | | | cttacaatggcttcaggtggtggcgcaccagtggcagacaataacgaagg |
| | | | tgccgatggagtgggtagttcctcgggaaattggcattgcgattcccaat |
| | | | ggctgggggacagagtcatcaccaccagcacccgaacctgggccctgccc |
| | | | acctacaacaatcacctctacaagcaaatctccaacagcacatctggagg |
| | | | atcttcaaatgacaacgcctacttcggctacagcaccccctgggggtatt |
| | | | ttgacttcaacagattccactgccacttctcaccacgtgactggcagcga |
| | | | ctcatcaacaacaactggggattccggcctaagcgactcaacttcaagct |
| | | | cttcaacattcaggtcaaagaggttacggacaacaatggagtcaagacca |
| | | | tcgccaataaccttaccagcacggtccaggtcttcacggactcagactat |
| | | | cagctcccgtacgtgctcgggtcggctcacgagggctgcctcccgccgtt |
| | | | cccagcggacgttttcatgattcctcagtacgggtatctgacgcttaatg |
| | | | atggaagccaggccgtgggtcgttcgtccttttactgcctggaatatttc |
| | | | ccgtcgcaaatgctaagaacgggtaacaacttccagttcagctacgagtt |
| | | | tgagaacgtacctttccatagcagctacgctcacagccaaagcctggacc |
| | | | gactaatgaatccactcatcgaccaatacttgtactatctctcTaGAact |
| | | | attAACGGTTCTGGACAGAATCAAcaaacgctaaaattcagtgtggccgg |
| | | | acccagcaacatggctgtccagggaagaaactacatacctggacccagct |
| | | | accgacaacaacgtgtctcaaccactgtgactcaaaacaacaacagcgaa |
| | | | tttgcttggcctggagcttcttcttgggctctcaatggacgtaatagctt |
| | | | gatgaatcctggacctgctatggccagccacaaagaaggagaggaccgtt |
| | | | tctttcctttgtctggatctttaatttttggcaaacaaggTacCggCaga |
| | | | gacaacgtggatgcggacaaagtcatgataaccaacgaagaagaaattaa |
| | | | aactactaacccggtagcaacggagtcctatggacaagtggccacaaacc |
| | | | accagagtGCACAGAAGGGGCCTGGTTATGAGCATGCGCAAGCCCAGacc |
| | | | ggttgggttcaaaaccaaggaatacttccgggtatggtttggcaggacag |
| | | | agatgtgtacctgcaaggacccatttgggccaaaattcctcacacggacg |
| | | | gcaactttcacccttctccgctgatgggagggtttggaatgaagcacccg |
| | | | cctcctcagatcctcatcaaaaacacacctgtacctgcggatcctccaac |
| | | | ggccttcaacaaggacaagctgaactctttcatcacccagtattctactg |
| | | | gccaagtcagcgtggagatcgagtgggagctgcagaaggaaaacagcaag |
| | | | cgctggaacccggagatccagtacacttccaactattacaagtctaataa |
| | | | tgttgaatttgctgttaatactgaaggtgtatatagtgaaccccgcccca |
| | | | ttggcaccagatacctgactcgtaatctg |
| 105 | DNA | Adeno- | atggctgccgatggttatcttccagattggctcgaggacaaccttagtga |
| | | Associated | aggaattcgcgagtggtgggctttgaaacctggagcccctcaacccaagg |
| | | Virus 9 | caaatcaacaacatcaagacaacgctcgaggtcttgtgcttccgggttac |
| | | comprising | aaataccttggacccggcaacggactcgacaagggggagccggtcaacgc |
| | | SEQ | agcagacgcggcggccctcgagcacgacaaggcctacgaccagcagctca |
| | | ID NO: 9 | aggccggagacaacccgtacctcaagtacaaccacgccgacgccgagttc |
| | | | caggagcggctcaaagaagatacgtcttttgggggcaacctcgggcgagc |
| | | | agtcttccaggccaaaaagaggcttcttgaacctcttggtctggttgagg |
| | | | aagcggctaagacggctcctggaaagaagaggcctgtagagcagtctcct |
| | | | caggaaccggactcctccgcgggtattggcaaatcgggtgcacagcccgc |
| | | | taaaaagagactcaatttcggtcagactggcgacacagagtcagtcccag |
| | | | accctcaaccaatcggagaacctcccgcagccccctcaggtgtgggatct |
| | | | cttacaatggcttcaggtggtggcgcaccagtggcagacaataacgaagg |
| | | | tgccgatggagtgggtagttcctcgggaaattggcattgcgattcccaat |
| | | | ggctgggggacagagtcatcaccaccagcacccgaacctgggccctgccc |
| | | | acctacaacaatcacctctacaagcaaatctccaacagcacatctggagg |
| | | | atcttcaaatgacaacgcctacttcggctacagcaccccctgggggtatt |
| | | | ttgacttcaacagattccactgccacttctcaccacgtgactggcagcga |
| | | | ctcatcaacaacaactggggattccggcctaagcgactcaacttcaagct |
| | | | cttcaacattcaggtcaaagaggttacggacaacaatggagtcaagacca |
| | | | tcgccaataaccttaccagcacggtccaggtcttcacggactcagactat |
| | | | cagctcccgtacgtgctcgggtcggctcacgagggctgcctcccgccgtt |
| | | | cccagcggacgttttcatgattcctcagtacgggtatctgacgcttaatg |
| | | | atggaagccaggccgtgggtcgttcgtccttttactgcctggaatatttc |
| | | | ccgtcgcaaatgctaagaacgggtaacaacttccagttcagctacgagtt |
| | | | tgagaacgtacctttccatagcagctacgctcacagccaaagcctggacc |
| | | | gactaatgaatccactcatcgaccaatacttgtactatctctcTaGAact |
| | | | attAACGGTTCTGGACAGAATCAAcaaacgctaaaattcagtgtggccgg |
| | | | acccagcaacatggctgtccagggaagaaactacatacctggacccagct |
| | | | accgacaacaacgtgtctcaaccactgtgactcaaaacaacaacagcgaa |
| | | | tttgcttggcctggagcttcttcttgggctctcaatggacgtaatagctt |
| | | | gatgaatcctggacctgctatggccagccacaaagaaggagaggaccgtt |
| | | | tctttcctttgtctggatctttaatttttggcaaacaaggTacCggCaga |
| | | | gacaacgtggatgcggacaaagtcatgataaccaacgaagaagaaattaa |
| | | | aactactaacccggtagcaacggagtcctatggacaagtggccacaaacc |
| | | | accagagtGCTCAAAAGGGACCTGGTTATGAACACGCCCAGGCCCAGacc |
| | | | ggttgggttcaaaaccaaggaatacttccgggtatggtttggcaggacag |
| | | | agatgtgtacctgcaaggacccatttgggccaaaattcctcacacggacg |
| | | | gcaactttcacccttctccgctgatgggagggtttggaatgaagcacccg |
| | | | cctcctcagatcctcatcaaaaacacacctgtacctgcggatcctccaac |
| | | | ggccttcaacaaggacaagctgaactctttcatcacccagtattctactg |
| | | | gccaagtcagcgtggagatcgagtgggagctgcagaaggaaaacagcaag |
| | | | cgctggaacccggagatccagtacacttccaactattacaagtctaataa |
| | | | tgttgaatttgctgttaatactgaaggtgtatatagtgaaccccgcccca |
| | | | ttggcaccagatacctgactcgtaatctg |
| 106 | DNA | Adeno- | atggctgccgatggttatcttccagattggctcgaggacaaccttagtga |
| | | Associated | aggaattcgcgagtggtgggctttgaaacctggagcccctcaacccaagg |
| | | Virus 9 | caaatcaacaacatcaagacaacgctcgaggtcttgtgcttccgggttac |
| | | comprising | aaataccttggacccggcaacggactcgacaagggggagccggtcaacgc |
| | | SEQ | agcagacgcggcggccctcgagcacgacaaggcctacgaccagcagctca |
| | | ID NO: 9 | aggccggagacaacccgtacctcaagtacaaccacgccgacgccgagttc |
| | | | caggagcggctcaaagaagatacgtcttttgggggcaacctcgggcgagc |
| | | | agtcttccaggccaaaaagaggcttcttgaacctcttggtctggttgagg |
| | | | aagcggctaagacggctcctggaaagaagaggcctgtagagcagtctcct |
| | | | caggaaccggactcctccgcgggtattggcaaatcgggtgcacagcccgc |
| | | | taaaaagagactcaatttcggtcagactggcgacacagagtcagtcccag |
| | | | accctcaaccaatcggagaacctcccgcagccccctcaggtgtgggatct |
| | | | cttacaatggcttcaggtggtggcgcaccagtggcagacaataacgaagg |
| | | | tgccgatggagtgggtagttcctcgggaaattggcattgcgattcccaat |
| | | | ggctgggggacagagtcatcaccaccagcacccgaacctgggccctgccc |
| | | | acctacaacaatcacctctacaagcaaatctccaacagcacatctggagg |
| | | | atcttcaaatgacaacgcctacttcggctacagcaccccctgggggtatt |
| | | | ttgacttcaacagattccactgccacttctcaccacgtgactggcagcga |
| | | | ctcatcaacaacaactggggattccggcctaagcgactcaacttcaagct |
| | | | cttcaacattcaggtcaaagaggttacggacaacaatggagtcaagacca |
| | | | tcgccaataaccttaccagcacggtccaggtcttcacggactcagactat |
| | | | agctcccgtacgtgctcgggtcggctcacgagggctgcctcccgccgttc |
| | | | ccagcggacgttttcatgattcctcagtacgggtatctgacgcttaatga |
| | | | tggaagccaggccgtgggtcgttcgtccttttactgcctggaatatttcc |
| | | | cgtcgcaaatgctaagaacgggtaacaacttccagttcagctacgagttt |
| | | | gagaacgtacctttccatagcagctacgctcacagccaaagcctggaccg |
| | | | actaatgaatccactcatcgaccaatacttgtactatctctcTaGAacta |
| | | | ttAACGGTTCTGGACAGAATCAAcaaacgctaaaattcagtgtggccgga |
| | | | cccagcaacatggctgtccagggaagaaactacatacctggacccagcta |
| | | | ccgacaacaacgtgtctcaaccactgtgactcaaaacaacaacagcgaat |
| | | | ttgcttggcctggagcttcttcttgggctctcaatggacgtaatagcttg |
| | | | atgaatcctggacctgctatggccagccacaaagaaggagaggaccgttt |
| | | | ctttcctttgtctggatctttaatttttggcaaacaaggTacCggCagag |
| | | | acaacgtggatgcggacaaagtcatgataaccaacgaagaagaaattaaa |
| | | | actactaacccggtagcaacggagtcctatggacaagtggccacaaacca |
| | | | ccagagtGCACAGAAAGGTCCGGGCTATGAACACGCACAAGCTCAGaccg |
| | | | gttgggttcaaaaccaaggaatacttccgggtatggtttggcaggacaga |
| | | | gatgtgtacctgcaaggacccatttgggccaaaattcctcacacggacgg |
| | | | caactttcacccttctccgctgatgggagggtttggaatgaagcacccgc |
| | | | ctcctcagatcctcatcaaaaacacacctgtacctgcggatcctccaacg |
| | | | gccttcaacaaggacaagctgaactctttcatcacccagtattctactgg |
| | | | ccaagtcagcgtggagatcgagtgggagctgcagaaggaaaacagcaagc |
| | | | gctggaacccggagatccagtacacttccaactattacaagtctaataat |
| | | | gttgaatttgctgttaatactgaaggtgtatatagtgaaccccgccccat |
| | | | tggcaccagatacctgactcgtaatctg |
| 107 | DNA | Adeno- | atggctgccgatggttatcttccagattggctcgaggacaaccttagtga |
| | | Associated | aggaattcgcgagtggtgggctttgaaacctggagcccctcaacccaagg |
| | | Virus 9 | caaatcaacaacatcaagacaacgctcgaggtcttgtgcttccgggttac |
| | | comprising | aaataccttggacccggcaacggactcgacaagggggagccggtcaacgc |
| | | SEQ | agcagacgcggcggccctcgagcacgacaaggcctacgaccagcagctca |
| | | ID NO: 9 | aggccggagacaacccgtacctcaagtacaaccacgccgacgccgagttc |
| | | | caggagcggctcaaagaagatacgtcttttgggggcaacctcgggcgagc |
| | | | agtcttccaggccaaaaagaggcttcttgaacctcttggtctggttgagg |
| | | | aagcggctaagacggctcctggaaagaagaggcctgtagagcagtctcct |
| | | | caggaaccggactcctccgcgggtattggcaaatcgggtgcacagcccgc |
| | | | taaaaagagactcaatttcggtcagactggcgacacagagtcagtcccag |
| | | | accctcaaccaatcggagaacctcccgcagccccctcaggtgtgggatct |
| | | | cttacaatggcttcaggtggtggcgcaccagtggcagacaataacgaagg |
| | | | tgccgatggagtgggtagttcctcgggaaattggcattgcgattcccaat |
| | | | ggctgggggacagagtcatcaccaccagcacccgaacctgggccctgccc |
| | | | acctacaacaatcacctctacaagcaaatctccaacagcacatctggagg |
| | | | atcttcaaatgacaacgcctacttcggctacagcaccccctgggggtatt |
| | | | ttgacttcaacagattccactgccacttctcaccacgtgactggcagcga |
| | | | ctcatcaacaacaactggggattccggcctaagcgactcaacttcaagct |
| | | | cttcaacattcaggtcaaagaggttacggacaacaatggagtcaagacca |
| | | | tcgccaataaccttaccagcacggtccaggtcttcacggactcagactat |
| | | | cagctcccgtacgtgctcgggtcggctcacgagggctgcctcccgccgtt |
| | | | cccagcggacgttttcatgattcctcagtacgggtatctgacgcttaatg |
| | | | atggaagccaggccgtgggtcgttcgtccttttactgcctggaatatttc |
| | | | ccgtcgcaaatgctaagaacgggtaacaacttccagttcagctacgagtt |
| | | | tgagaacgtacctttccatagcagctacgctcacagccaaagcctggacc |
| | | | gactaatgaatccactcatcgaccaatacttgtactatctctcTaGAact |
| | | | attAACGGTTCTGGACAGAATCAAcaaacgctaaaattcagtgtggccgg |
| | | | acccagcaacatggctgtccagggaagaaactacatacctggacccagct |
| | | | accgacaacaacgtgtctcaaccactgtgactcaaaacaacaacagcgaa |
| | | | tttgcttggcctggagcttcttcttgggctctcaatggacgtaatagctt |
| | | | gatgaatcctggacctgctatggccagccacaaagaaggagaggaccgtt |
| | | | tctttcctttgtctggatctttaatttttggcaaacaaggTacCggCaga |
| | | | gacaacgtggatgcggacaaagtcatgataaccaacgaagaagaaattaa |
| | | | aactactaacccggtagcaacggagtcctatggacaagtggccacaaacc |
| | | | accagagtGCTCAGAAGGGACCGGGGTATGAGCACGCACAAGCTCAGacc |
| | | | ggttgggttcaaaaccaaggaatacttccgggtatggtttggcaggacag |
| | | | agatgtgtacctgcaaggacccatttgggccaaaattcctcacacggacg |
| | | | gcaactttcacccttctccgctgatgggagggtttggaatgaagcacccg |
| | | | cctcctcagatcctcatcaaaaacacacctgtacctgcggatcctccaac |
| | | | ggccttcaacaaggacaagctgaactctttcatcacccagtattctactg |
| | | | gccaagtcagcgtggagatcgagtgggagctgcagaaggaaaacagcaag |
| | | | cgctggaacccggagatccagtacacttccaactattacaagtctaataa |
| | | | tgttgaatttgctgttaatactgaaggtgtatatagtgaaccccgcccca |
| | | | ttggcaccagatacctgactcgtaatctg |
| 108 | DNA | Adeno- | atggctgccgatggttatcttccagattggctcgaggacaaccttagtga |
| | | Associated | aggaattcgcgagtggtgggctttgaaacctggagcccctcaacccaagg |
| | | Virus 9 | caaatcaacaacatcaagacaacgctcgaggtcttgtgcttccgggttac |
| | | comprising | aaataccttggacccggcaacggactcgacaagggggagccggtcaacgc |
| | | SEQ | agcagacgcggcggccctcgagcacgacaaggcctacgaccagcagctca |
| | | ID NO: 9 | aggccggagacaacccgtacctcaagtacaaccacgccgacgccgagttc |
| | | | caggagcggctcaaagaagatacgtcttttgggggcaacctcgggcgagc |
| | | | agtcttccaggccaaaaagaggcttcttgaacctcttggtctggttgagg |
| | | | aagcggctaagacggctcctggaaagaagaggcctgtagagcagtctcct |
| | | | caggaaccggactcctccggggtattggcaaatcgggtgcacagcccgct |
| | | | aaaaagagactcaatttcggtcagactggcgacacagagtcagtcccaga |
| | | | ccctcaaccaatcggagaacctcccgcagccccctcaggtgtgggatctc |
| | | | ttacaatggcttcaggtggtggcgcaccagtggcagacaataacgaaggt |
| | | | gccgatggagtgggtagttcctcgggaaattggcattgcgattcccaatg |
| | | | gctgggggacagagtcatcaccaccagcacccgaacctgggccctgccca |
| | | | cctacaacaatcacctctacaagcaaatctccaacagcacatctggagga |
| | | | tcttcaaatgacaacgcctacttcggctacagcaccccctgggggtattt |
| | | | tgacttcaacagattccactgccacttctcaccacgtgactggcagcgac |
| | | | tcatcaacaacaactggggattccggcctaagcgactcaacttcaagctc |
| | | | ttcaacattcaggtcaaagaggttacggacaacaatggagtcaagaccat |
| | | | cgccaataaccttaccagcacggtccaggtcttcacggactcagactatc |
| | | | agctcccgtacgtgctcgggtcggctcacgagggctgcctcccgccgttc |
| | | | ccagcggacgttttcatgattcctcagtacgggtatctgacgcttaatga |
| | | | tggaagccaggccgtgggtcgttcgtccttttactgcctggaatatttcc |
| | | | cgtcgcaaatgctaagaacgggtaacaacttccagttcagctacgagttt |
| | | | gagaacgtacctttccatagcagctacgctcacagccaaagcctggaccg |
| | | | actaatgaatccactcatcgaccaatacttgtactatctctcTaGAacta |
| | | | ttAACGGTTCTGGACAGAATCAAcaaacgctaaaattcagtgtggccgga |
| | | | cccagcaacatggctgtccagggaagaaactacatacctggacccagcta |
| | | | ccgacaacaacgtgtctcaaccactgtgactcaaaacaacaacagcgaat |
| | | | ttgcttggcctggagcttcttcttgggctctcaatggacgtaatagcttg |
| | | | atgaatcctggacctgctatggccagccacaaagaaggagaggaccgttt |
| | | | ctttcctttgtctggatctttaatttttggcaaacaaggTacCggCagag |
| | | | acaacgtggatgcggacaaagtcatgataaccaacgaagaagaaattaaa |
| | | | actactaacccggtagcaacggagtcctatggacaagtggccacaaacca |
| | | | ccagagtGCCCAAAAAGGTCCGGGGTACGAACACGCCCAGGCTCAGaccg |
| | | | gttgggttcaaaaccaaggaatacttccgggtatggtttggcaggacaga |
| | | | gatgtgtacctgcaaggacccatttgggccaaaattcctcacacggacgg |
| | | | caactttcacccttctccgctgatgggagggtttggaatgaagcacccgc |
| | | | ctcctcagatcctcatcaaaaacacacctgtacctgcggatcctccaacg |
| | | | gccttcaacaaggacaagctgaactctttcatcacccagtattctactgg |
| | | | ccaagtcagcgtggagatcgagtgggagctgcagaaggaaaacagcaagc |
| | | | gctggaacccggagatccagtacacttccaactattacaagtctaataat |
| | | | gttgaatttgctgttaatactgaaggtgtatatagtgaaccccgccccat |
| | | | tggcaccagatacctgactcgtaatctg |
| 109 | DNA | Adeno- | atggctgccgatggttatcttccagattggctcgaggacaaccttagtga |
| | | Associated | aggaattcgcgagtggtgggctttgaaacctggagcccctcaacccaagg |
| | | Virus 9 | caaatcaacaacatcaagacaacgctcgaggtcttgtgcttccgggttac |
| | | comprising | aaataccttggacccggcaacggactcgacaagggggagccggtcaacgc |
| | | SEQ | agcagacgcggcggccctcgagcacgacaaggcctacgaccagcagctca |
| | | ID NO: 9 | aggccggagacaacccgtacctcaagtacaaccacgccgacgccgagttc |
| | | | caggagcggctcaaagaagatacgtcttttgggggcaacctcgggcgagc |
| | | | agtcttccaggccaaaaagaggcttcttgaacctcttggtctggttgagg |
| | | | aagcggctaagacggctcctggaaagaagaggcctgtagagcagtctcct |
| | | | caggaaccggactcctccgcgggtattggcaaatcgggtgcacagcccgc |
| | | | taaaaagagactcaatttcggtcagactggcgacacagagtcagtcccag |
| | | | accctcaaccaatcggagaacctcccgcagccccctcaggtgtgggatct |
| | | | cttacaatggcttcaggtggtggcgcaccagtggcagacaataacgaagg |
| | | | tgccgatggagtgggtagttcctcgggaaattggcattgcgattcccaat |
| | | | ggctgggggacagagtcatcaccaccagcacccgaacctgggccctgccc |
| | | | acctacaacaatcacctctacaagcaaatctccaacagcacatctggagg |
| | | | atcttcaaatgacaacgcctacttcggctacagcaccccctgggggtatt |
| | | | ttgacttcaacagattccactgccacttctcaccacgtgactggcagcga |
| | | | ctcatcaacaacaactggggattccggcctaagcgactcaacttcaagct |
| | | | cttcaacattcaggtcaaagaggttacggacaacaatggagtcaagacca |
| | | | tcgccaataaccttaccagcacggtccaggtcttcacggactcagactat |
| | | | cagctcccgtacgtgctcgggtcggctcacgagggctgcctcccgccgtt |
| | | | cccagcggacgttttcatgattcctcagtacgggtatctgacgcttaatg |
| | | | atggaagccaggccgtgggtcgttcgtccttttactgcctggaatatttc |
| | | | ccgtcgcaaatgctaagaacgggtaacaacttccagttcagctacgagtt |
| | | | tgagaacgtacctttccatagcagctacgctcacagccaaagcctggacc |
| | | | gactaatgaatccactcatcgaccaatacttgtactatctctcTaGAact |
| | | | attAACGGTTCTGGACAGAATCAAcaaacgctaaaattcagtgtggccgg |
| | | | acccagcaacatggctgtccagggaagaaactacatacctggacccagct |
| | | | accgacaacaacgtgtctcaaccactgtgactcaaaacaacaacagcgaa |
| | | | tttgcttggcctggagcttcttcttgggctctcaatggacgtaatagctt |
| | | | gatgaatcctggacctgctatggccagccacaaagaaggagaggaccgtt |
| | | | tctttcctttgtctggatctttaatttttggcaaacaaggTacCggCaga |
| | | | gacaacgtggatgcggacaaagtcatgataaccaacgaagaagaaattaa |
| | | | aactactaacccggtagcaacggagtcctatggacaagtggccacaaacc |
| | | | accagagtGCACAGAAAGGTCCAGGATACGAGCATGCACAAGCTCAAacc |
| | | | ggttgggttcaaaaccaaggaatacttccgggtatggtttggcaggacag |
| | | | agatgtgtacctgcaaggacccatttgggccaaaattcctcacacggacg |
| | | | gcaactttcacccttctccgctgatgggagggtttggaatgaagcacccg |
| | | | cctcctcagatcctcatcaaaaacacacctgtacctgcggatcctccaac |
| | | | ggccttcaacaaggacaagctgaactctttcatcacccagtattctactg |
| | | | gccaagtcagcgtggagatcgagtgggagctgcagaaggaaaacagcaag |
| | | | cgctggaacccggagatccagtacacttccaactattacaagtctaataa |
| | | | tgttgaatttgctgttaatactgaaggtgtatatagtgaaccccgcccca |
| | | | ttggcaccagatacctgactcgtaatctg |
| 110 | DNA | Adeno- | atggctgccgatggttatcttccagattggctcgaggacaaccttagtga |
| | | Associated | aggaattcgcgagtggtgggctttgaaacctggagcccctcaacccaagg |
| | | Virus 9 | caaatcaacaacatcaagacaacgctcgaggtcttgtgcttccgggttac |
| | | comprising | aaataccttggacccggcaacggactcgacaagggggagccggtcaacgc |
| | | SEQ | agcagacgcggcggccctcgagcacgacaaggcctacgaccagcagctca |
| | | ID NO: 9 | aggccggagacaacccgtacctcaagtacaaccacgccgacgccgagttc |
| | | | caggagcggctcaaagaagatacgtcttttgggggcaacctcgggcgagc |
| | | | agtcttccaggccaaaaagaggcttcttgaacctcttggtctggttgagg |
| | | | aagcggctaagacggctcctggaaagaagaggcctgtagagcagtctcct |
| | | | caggaaccggactcctccgcgggtattggcaaatcgggtgcacagcccgc |
| | | | taaaaagagactcaatttcggtcagactggcgacacagagtcagtcccag |
| | | | accctcaaccaatcggagaacctcccgcagccccctcaggtgtgggatct |
| | | | cttacaatggcttcaggtggtggcgcaccagtggcagacaataacgaagg |
| | | | tgccgatggagtgggtagttcctcgggaaattggcattgcgattcccaat |
| | | | ggctgggggacagagtcatcaccaccagcacccgaacctgggccctgccc |
| | | | acctacaacaatcacctctacaagcaaatctccaacagcacatctggagg |
| | | | atcttcaaatgacaacgcctacttcggctacagcaccccctgggggtatt |
| | | | ttgacttcaacagattccactgccacttctcaccacgtgactggcagcga |
| | | | ctcatcaacaacaactggggattccggcctaagcgactcaacttcaagct |
| | | | cttcaacattcaggtcaaagaggttacggacaacaatggagtcaagacca |
| | | | tcgccaataaccttaccagcacggtccaggtcttcacggactcagactat |
| | | | cagctcccgtacgtgctcgggtcggctcacgagggctgcctcccgccgtt |
| | | | cccagcggacgttttcatgattcctcagtacgggtatctgacgcttaatg |
| | | | atggaagccaggccgtgggtcgttcgtccttttactgcctggaatatttc |
| | | | ccgtcgcaaatgctaagaacgggtaacaacttccagttcagctacgagtt |
| | | | tgagaacgtacctttccatagcagctacgctcacagccaaagcctggacc |
| | | | gactaatgaatccactcatcgaccaatacttgtactatctctcTaGAact |
| | | | attAACGGTTCTGGACAGAATCAAcaaacgctaaaattcagtgtggccgg |
| | | | acccagcaacatggctgtccagggaagaaactacatacctggacccagct |
| | | | accgacaacaacgtgtctcaaccactgtgactcaaaacaacaacagcgaa |
| | | | tttgcttggcctggagcttcttcttgggctctcaatggacgtaatagctt |
| | | | gatgaatcctggacctgctatggccagccacaaagaaggagaggaccgtt |
| | | | tctttcctttgtctggatctttaatttttggcaaacaaggTacCggCaga |
| | | | gacaacgtggatgcggacaaagtcatgataaccaacgaagaagaaattaa |
| | | | aactactaacccggtagcaacggagtcctatggacaagtggccacaaacc |
| | | | accagagtGCGCAGAAGGGCCCAGGTTATGAGCATGCTCAAGCGCAAacc |
| | | | ggttgggttcaaaaccaaggaatacttccgggtatggtttggcaggacag |
| | | | agatgtgtacctgcaaggacccatttgggccaaaattcctcacacggacg |
| | | | gcaactttcacccttctccgctgatgggagggtttggaatgaagcacccg |
| | | | cctcctcagatcctcatcaaaaacacacctgtacctgcggatcctccaac |
| | | | ggccttcaacaaggacaagctgaactctttcatcacccagtattctactg |
| | | | gccaagtcagcgtggagatcgagtgggagctgcagaaggaaaacagcaag |
| | | | cgctggaacccggagatccagtacacttccaactattacaagtctaataa |
| | | | tgttgaatttgctgttaatactgaaggtgtatatagtgaaccccgcccca |
| | | | ttggcaccagatacctgactcgtaatctg |
| 111 | DNA | Adeno- | atggctgccgatggttatcttccagattggctcgaggacaaccttagtga |
| | | Associated | aggaattcgcgagtggtgggctttgaaacctggagcccctcaacccaagg |
| | | Virus 9 | caaatcaacaacatcaagacaacgctcgaggtcttgtgcttccgggttac |
| | | comprising | aaataccttggacccggcaacggactcgacaagggggagccggtcaacgc |
| | | SEQ | agcagacgcggcggccctcgagcacgacaaggcctacgaccagcagctca |
| | | ID NO: 10 | aggccggagacaacccgtacctcaagtacaaccacgccgacgccgagttc |
| | | | caggagcggctcaaagaagatacgtcttttgggggcaacctcgggcgagc |
| | | | agtcttccaggccaaaaagaggcttcttgaacctcttggtctggttgagg |
| | | | aagcggctaagacggctcctggaaagaagaggcctgtagagcagtctcct |
| | | | caggaaccggactcctccgcgggtattggcaaatcgggtgcacagcccgc |
| | | | taaaaagagactcaatttcggtcagactggcgacacagagtcagtcccag |
| | | | accctcaaccaatcggagaacctcccgcagccccctcaggtgtgggatct |
| | | | cttacaatggcttcaggtggtggcgcaccagtggcagacaataacgaagg |
| | | | tgccgatggagtgggtagttcctcgggaaattggcattgcgattcccaat |
| | | | ggctgggggacagagtcatcaccaccagcacccgaacctgggccctgccc |
| | | | acctacaacaatcacctctacaagcaaatctccaacagcacatctggagg |
| | | | atcttcaaatgacaacgcctacttcggctacagcaccccctgggggtatt |
| | | | ttgacttcaacagattccactgccacttctcaccacgtgactggcagcga |
| | | | ctcatcaacaacaactggggattccggcctaagcgactcaacttcaagct |
| | | | cttcaacattcaggtcaaagaggttacggacaacaatggagtcaagacca |
| | | | tcgccaataaccttaccagcacggtccaggtcttcacggactcagactat |
| | | | cagctcccgtacgtgctcgggtcggctcacgagggctgcctcccgcgttc |
| | | | ccagcggacgttttcatgattcctcagtacgggtatctgacgcttaatga |
| | | | tggaagccaggccgtgggtcgttcgtccttttactgcctggaatatttcc |
| | | | cgtcgcaaatgctaagaacgggtaacaacttccagttcagctacgagttt |
| | | | gagaacgtacctttccatagcagctacgctcacagccaaagcctggaccg |
| | | | actaatgaatccactcatcgaccaatacttgtactatctctcTaGAacta |
| | | | ttAACGGTTCTGGACAGAATCAAcaaacgctaaaattcagtgtggccgga |
| | | | cccagcaacatggctgtccagggaagaaactacatacctggacccagcta |
| | | | ccgacaacaacgtgtctcaaccactgtgactcaaaacaacaacagcgaat |
| | | | ttgcttggcctggagcttcttcttgggctctcaatggacgtaatagcttg |
| | | | atgaatcctggacctgctatggccagccacaaagaaggagaggaccgttt |
| | | | ctttcctttgtctggatctttaatttttggcaaacaaggTacCggCagag |
| | | | acaacgtggatgcggacaaagtcatgataaccaacgaagaagaaattaaa |
| | | | actactaacccggtagcaacggagtcctatggacaagtggccacaaacca |
| | | | ccagagtGCACAAAAGAATTCACCAAGTGAGTTTGCTCAAGCACAGaccg |
| | | | gttgggttcaaaaccaaggaatacttccgggtatggtttggcaggacaga |
| | | | gatgtgtacctgcaaggacccatttgggccaaaattcctcacacggacgg |
| | | | caactttcacccttctccgctgatgggagggtttggaatgaagcacccgc |
| | | | ctcctcagatcctcatcaaaaacacacctgtacctgcggatcctccaacg |
| | | | gccttcaacaaggacaagctgaactctttcatcacccagtattctactgg |
| | | | ccaagtcagcgtggagatcgagtgggagctgcagaaggaaaacagcaagc |
| | | | gctggaacccggagatccagtacacttccaactattacaagtctaataat |
| | | | gttgaatttgctgttaatactgaaggtgtatatagtgaaccccgccccat |
| | | | tggcaccagatacctgactcgtaatctg |
| 112 | DNA | Adeno- | atggctgccgatggttatcttccagattggctcgaggacaaccttagtga |
| | | Associated | aggaattcgcgagtggtgggctttgaaacctggagcccctcaacccaagg |
| | | Virus 9 | caaatcaacaacatcaagacaacgctcgaggtcttgtgcttccgggttac |
| | | comprising | aaataccttggacccggcaacggactcgacaagggggagccggtcaacgc |
| | | SEQ | agcagacgcggcggccctcgagcacgacaaggcctacgaccagcagctca |
| | | ID NO: 10 | aggrcggagacaacccgtacctcaagtacaaccacgccgacgccgagttc |
| | | | caggagcggctcaaagaagatacgtcttttgggggcaacctcgggcgagc |
| | | | agtcttccaggccaaaaagaggcttcttgaacctcttggtctggttgagg |
| | | | aagcggctaagacggctcctggaaagaagaggcctgtagagcagtctcct |
| | | | caggaaccggactcctccgcgggtattggcaaatcgggtgcacagcccgc |
| | | | taaaaagagactcaatttcggtcagactggcgacacagagtcagtcccag |
| | | | accctcaaccaatcggagaacctcccgcagccccctcaggtgtgggatct |
| | | | cttacaatggcttcaggtggtggcgcaccagtggcagacaataacgaagg |
| | | | tgccgatggagtgggtagttcctcgggaaattggcattgcgattcccaat |
| | | | ggctgggggacagagtcatcaccaccagcacccgaacctgggccctgccc |
| | | | acctacaacaatcacctctacaagcaaatctccaacagcacatctggagg |
| | | | atcttcaaatgacaacgcctacttcggctacagcaccccctgggggtatt |
| | | | ttgacttcaacagattccactgccacttctcaccacgtgactggcagcga |
| | | | ctcatcaacaacaactggggattccggcctaagcgactcaacttcaagct |
| | | | cttcaacattcaggtcaaagaggttacggacaacaatggagtcaagacca |
| | | | tcgccaataaccttaccagcacggtccaggtcttcacggactcagactat |
| | | | cagctcccgtacgtgctcgggtcggctcacgagggctgcctcccgccgtt |
| | | | cccagcggacgttttcatgattcctcagtacgggtatctgacgcttaatg |
| | | | atggaagccaggccgtgggtcgttcgtccttttactgcctggaatatttc |
| | | | ccgtcgcaaatgctaagaacgggtaacaacttccagttcagctacgagtt |
| | | | tgagaacgtacctttccatagcagctacgctcacagccaaagcctggacc |
| | | | gactaatgaatccactcatcgaccaatacttgtactatctctcTaGAact |
| | | | attAACGGTTCTGGACAGAATCAAcaaacgctaaaattcagtgtggccgg |
| | | | acccagcaacatggctgtccagggaagaaactacatacctggacccagct |
| | | | accgacaacaacgtgtctcaaccactgtgactcaaaacaacaacagcgaa |
| | | | tttgcttggcctggagcttcttcttgggctctcaatggacgtaatagctt |
| | | | gatgaatcctggacctgctatggccagccacaaagaaggagaggaccgtt |
| | | | tctttcctttgtctggatctttaatttttggcaaacaaggTacCggCaga |
| | | | gacaacgtggatgggacaaagtcatgataaccaacgaagaagaaattaaa |
| | | | actactaacccggtagcaacggagtcctatggacaagtggccacaaacca |
| | | | ccagagtGCCCAGAAAAATTCACCGTCTGAGTTCGCCCAGGCACAAaccg |
| | | | gttgggttcaaaaccaaggaatacttccgggtatggtttggcaggacaga |
| | | | gatgtgtacctgcaaggacccatttgggccaaaattcctcacacggacgg |
| | | | caactttcacccttctccgctgatgggagggtttggaatgaagcacccgc |
| | | | ctcctcagatcctcatcaaaaacacacctgtacctgcggatcctccaacg |
| | | | gccttcaacaaggacaagctgaactctttcatcacccagtattctactgg |
| | | | ccaagtcagcgtggagatcgagtgggagctgcagaaggaaaacagcaagc |
| | | | gctggaacccggagatccagtacacttccaactattacaagtctaataat |
| | | | gttgaatttgctgttaatactgaaggtgtatatagtgaaccccgccccat |
| | | | tggcaccagatacctgactcgtaatctg |
| 113 | DNA | Adeno- | atggctgccgatggttatcttccagattggctcgaggacaaccttagtga |
| | | Associated | aggaattcgcgagtggtgggctttgaaacctggagcccctcaacccaagg |
| | | Virus 9 | caaatcaacaacatcaagacaacgctcgaggtcttgtgcttccgggttac |
| | | comprising | aaataccttggacccggcaacggactcgacaagggggagccggtcaacgc |
| | | SEQ | agcagacgcggcggccctcgagcacgacaaggcctacgaccagcagctca |
| | | ID NO: 10 | aggccggagacaacccgtacctcaagtacaaccacgccgacgccgagttc |
| | | | caggagcggctcaaagaagatacgtcttttgggggcaacctcgggcgagc |
| | | | agtcttccaggccaaaaagaggcttcttgaacctcttggtctggttgagg |
| | | | aagcggctaagacggctcctggaaagaagaggcctgtagagcagtctcct |
| | | | caggaaccggactcctccgcgggtattggcaaatcgggtgcacagcccgc |
| | | | taaaaagagactcaatttcggtcagactggcgacacagagtcagtcccag |
| | | | accctcaaccaatcggagaacctcccgcagccccctcaggtgtgggatct |
| | | | cttacaatggcttcaggtggtggcgcaccagtggcagacaataacgaagg |
| | | | tgccgatggagtgggtagttcctcgggaaattggcattgcgattcccaat |
| | | | ggctgggggacagagtcatcaccaccagcacccgaacctgggccctgccc |
| | | | acctacaacaatcacctctacaagcaaatctccaacagcacatctggagg |
| | | | atcttcaaatgacaacgcctacttcggctacagcaccccctgggggtatt |
| | | | ttgacttcaacagattccactgccacttctcaccacgtgactggcagcga |
| | | | ctcatcaacaacaactggggattccggcctaagcgactcaacttcaagct |
| | | | cttcaacattcaggtcaaagaggttacggacaacaatggagtcaagacca |
| | | | tcgccaataaccttaccagcacggtccaggtcttcacggactcagactat |
| | | | cagctcccgtacgtgctcgggtcggctcacgagggctgcctcccgccgtt |
| | | | cccagcggacgttttcatgattcctcagtacgggtatctgacgcttaatg |
| | | | atggaagccaggccgtgggtcgttcgtccttttactgcctggaatatttc |
| | | | ccgtcgcaaatgctaagaacgggtaacaacttccagttcagctacgagtt |
| | | | tgagaacgtacctttccatagcagctacgctcacagccaaagcctggacc |
| | | | gactaatgaatccactcatcgaccaatacttgtactatctctcTaGAact |
| | | | attAACGGTTCTGGACAGAATCAAcaaacgctaaaattcagtgtggccgg |
| | | | acccagcaacatggctgtccagggaagaaactacatacctggacccagct |
| | | | accgacaacaacgtgtctcaaccactgtgactcaaaacaacaacagcgaa |
| | | | tttgcttggcctggagcttcttcttgggctctcaatggacgtaatagctt |
| | | | gatgaatcctggacctgctatggccagccacaaagaaggagaggaccgtt |
| | | | tctttcctttgtctggatctttaatttttggcaaacaaggTacCggCaga |
| | | | gacaacgtggatgcggacaaagtcatgataaccaacgaagaagaaattaa |
| | | | aactactaacccggtagcaacggagtcctatggacaagtggccacaaacc |
| | | | accagagtGCTCAAAAAAACAGTCCCTCCGAGTTTGCACAGGCTCAAacc |
| | | | ggttgggttcaaaaccaaggaatacttccgggtatggtttggcaggacag |
| | | | agatgtgtacctgcaaggacccatttgggccaaaattcctcacacggacg |
| | | | gcaactttcacccttctccgctgatgggagggtttggaatgaagcacccg |
| | | | cctcctcagatcctcatcaaaaacacacctgtacctgcggatcctccaac |
| | | | ggccttcaacaaggacaagctgaactctttcatcacccagtattctactg |
| | | | gccaagtcagcgtggagatcgagtgggagctgcagaaggaaaacagcaag |
| | | | cgctggaacccggagatccagtacacttccaactattacaagtctaataa |
| | | | tgttgaatttgctgttaatactgaaggtgtatatagtgaaccccgcccca |
| | | | ttggcaccagatacctgactcgtaatctg |
| 114 | DNA | Adeno- | atggctgccgatggttatcttccagattggctcgaggacaaccttagtga |
| | | Associated | aggaattcgcgagtggtgggctttgaaacctggagcccctcaacccaagg |
| | | Virus 9 | caaatcaacaacatcaagacaacgctcgaggtcttgtgcttccgggttac |
| | | comprising | aaataccttggacccggcaacggactcgacaagggggagccggtcaacgc |
| | | SEQ | agcagacgcggcggccctcgagcacgacaaggcctacgaccagcagctca |
| | | ID NO: 10 | aggccggagacaacccgtacctcaagtacaaccacgccgacgccgagttc |
| | | | caggagcggctcaaagaagatacgtcttttgggggcaacctcgggcgagc |
| | | | agtcttccaggccaaaaagaggcttcttgaacctcttggtctggttgagg |
| | | | aagcggctaagacggctcctggaaagaagaggcctgtagagcagtctcct |
| | | | caggaaccggactcctccgcgggtattggcaaatcgggtgcacagcccgc |
| | | | taaaaagagactcaatttcggtcagactggcgacacagagtcagtcccag |
| | | | accctcaaccaatcggagaacctcccgcagccccctcaggtgtgggatct |
| | | | cttacaatggcttcaggtggtggcgcaccagtggcagacaataacgaagg |
| | | | tgccgatggagtgggtagttcctcgggaaattggcattgcgattcccaat |
| | | | ggctgggggacagagtcatcaccaccagcacccgaacctgggccctgccc |
| | | | acctacaacaatcacctctacaagcaaatctccaacagcacatctggagg |
| | | | atcttcaaatgacaacgcctacttcggctacagcaccccctgggggtatt |
| | | | ttgacttcaacagattccactgccacttctcaccacgtgactggcagcga |
| | | | ctcatcaacaacaactggggattccggcctaagcgactcaacttcaagct |
| | | | cttcaacattcaggtcaaagaggttacggacaacaatggagtcaagacca |
| | | | tcgccaataaccttaccagcacggtccaggtcttcacggactcagactat |
| | | | cagctcccgtacgtgctcgggtcggctcacgagggctgcctcccgccgtt |
| | | | cccagcggacgttttcatgattcctcagtacgggtatctgacgcttaatg |
| | | | atggaagccaggccgtgggtcgttcgtccttttactgcctggaatatttc |
| | | | ccgtcgcaaatgctaagaacgggtaacaacttccagttcagctacgagtt |
| | | | tgagaacgtacctttccatagcagctacgctcacagccaaagcctggacc |
| | | | gactaatgaatccactcatcgaccaatacttgtactatctctcTaGAact |
| | | | attAACGGTTCTGGACAGAATCAAcaaacgctaaaattcagtgtggccgg |
| | | | acccagcaacatggctgtccagggaagaaactacatacctggacccagct |
| | | | accgacaacaacgtgtctcaaccactgtgactcaaaacaacaacagcgaa |
| | | | tttgcttggcctggagcttcttcttgggctctcaatggacgtaatagctt |
| | | | gatgaatcctggacctgctatggccagccacaaagaaggagaggaccgtt |
| | | | tctttcctttgtctggatctttaatttttggcaaacaaggTacCggCaga |
| | | | gacaacgtggatgcggacaaagtcatgataaccaacgaagaagaaattaa |
| | | | aactactaacccggtagcaacggagtcctatggacaagtggccacaaacc |
| | | | accagagtGCGCAGAAGAATTCACCGTCAGAATTCGCCCAAGCCCAGacc |
| | | | ggttgggttcaaaaccaaggaatacttccgggtatggtttggcaggacag |
| | | | agatgtgtacctgcaaggacccatttgggccaaaattcctcacacggacg |
| | | | gcaactttcacccttctccgctgatgggagggtttggaatgaagcacccg |
| | | | cctcctcagatcctcatcaaaaacacacctgtacctgcggatcctccaac |
| | | | ggccttcaacaaggacaagctgaactctttcatcacccagtattctactg |
| | | | gccaagtcagcgtggagatcgagtgggagctgcagaaggaaaacagcaag |
| | | | cgctggaacccggagatccagtacacttccaactattacaagtctaataa |
| | | | tgttgaatttgctgttaatactgaaggtgtatatagtgaaccccgcccca |
| | | | ttggcaccagatacctgactcgtaatctg |
| 115 | DNA | Adeno- | atggctgccgatggttatcttccagattggctcgaggacaaccttagtga |
| | | Associated | aggaattcgcgagtggtgggctttgaaacctggagcccctcaacccaagg |
| | | Virus 9 | caaatcaacaacatcaagacaacgctcgaggtcttgtgcttccgggttac |
| | | comprising | aaataccttggacccggcaacggactcgacaagggggagccggtcaacgc |
| | | SEQ | agcagacgcggcggccctcgagcacgacaaggcctacgaccagcagctca |
| | | ID NO: 10 | aggccggagacaacccgtacctcaagtacaaccacgccgacgccgagttc |
| | | | caggagcggctcaaagaagatacgtcttttgggggcaacctcgggcgagc |
| | | | agtcttccaggccaaaaagaggcttcttgaacctcttggtctggttgagg |
| | | | aagcggctaagacggctcctggaaagaagaggcctgtagagcagtctcct |
| | | | caggaaccggactcctccgcgggtattggcaaatcgggtgcacagcccgc |
| | | | taaaaagagactcaatttcggtcagactggcgacacagagtcagtcccag |
| | | | accctcaaccaatcggagaacctcccgcagccccctcaggtgtgggatct |
| | | | cttacaatggcttcaggtggtggcgcaccagtggcagacaataacgaagg |
| | | | tgccgatggagtgggtagttcctcgggaaattggcattgcgattcccaat |
| | | | ggctgggggacagagtcatcaccaccagcacccgaacctgggccctgccc |
| | | | acctacaacaatcacctctacaagcaaatctccaacagcacatctggagg |
| | | | atcttcaaatgacaacgcctacttcggctacagcaccccctgggggtatt |
| | | | ttgacttcaacagattccactgccacttctcaccacgtgactggcagcga |
| | | | ctcatcaacaacaactggggattccggcctaagcgactcaacttcaagct |
| | | | cttcaacattcaggtcaaagaggttacggacaacaatggagtcaagacca |
| | | | tcgccaataaccttaccagcacggtccaggtcttcacggactcagactat |
| | | | cagctcccgtacgtgctcgggtcggctcacgagggctgcctcccgccgtt |
| | | | cccagcggacgttttcatgattcctcagtacgggtatctgacgcttaatg |
| | | | atggaagccaggccgtgggtcgttcgtccttttactgcctggaatatttc |
| | | | cgtcgcaaatgctaagaacgggtaacaacttccagttcagctacgagttt |
| | | | gagaacgtacctttccatagcagctacgctcacagccaaagcctggaccg |
| | | | actaatgaatccactcatcgaccaatacttgtactatctctcTaGAacta |
| | | | ttAACGGTTCTGGACAGAATCAAcaaacgctaaaattcagtgtggccgga |
| | | | cccagcaacatggctgtccagggaagaaactacatacctggacccagcta |
| | | | ccgacaacaacgtgtctcaaccactgtgactcaaaacaacaacagcgaat |
| | | | ttgcttggcctggagcttcttcttgggctctcaatggacgtaatagcttg |
| | | | atgaatcctggacctgctatggccagccacaaagaaggagaggaccgttt |
| | | | ctttcctttgtctggatctttaatttttggcaaacaaggTacCggCagag |
| | | | acaacgtggatgcggacaaagtcatgataaccaacgaagaagaaattaaa |
| | | | actactaacccggtagcaacggagtcctatggacaagtggccacaaacca |
| | | | ccagagtGCCCAGAAAAACAGTCCGTCGGAATTCGCCCAGGCCCAAaccg |
| | | | gttgggttcaaaaccaaggaatacttccgggtatggtttggcaggacaga |
| | | | gatgtgtacctgcaaggacccatttgggccaaaattcctcacacggacgg |
| | | | caactttcacccttctccgctgatgggagggtttggaatgaagcacccgc |
| | | | ctcctcagatcctcatcaaaaacacacctgtacctgcggatcctccaacg |
| | | | gccttcaacaaggacaagctgaactctttcatcacccagtattctactgg |
| | | | ccaagtcagcgtggagatcgagtgggagctgcagaaggaaaacagcaagc |
| | | | gctggaacccggagatccagtacacttccaactattacaagtctaataat |
| | | | gttgaatttgctgttaatactgaaggtgtatatagtgaaccccgccccat |
| | | | tggcaccagatacctgactcgtaatctg |
| 116 | DNA | Adeno- | atggctgccgatggttatcttccagattggctcgaggacaaccttagtga |
| | | Associated | aggaattcgcgagtggtgggctttgaaacctggagcccctcaacccaagg |
| | | Virus 9 | caaatcaacaacatcaagacaacgctcgaggtcttgtgcttccgggttac |
| | | comprising | aaataccttggacccggcaacggactcgacaagggggagccggtcaacgc |
| | | SEQ | agcagacgcggcggccctcgagcacgacaaggcctacgaccagcagctca |
| | | ID NO: 10 | aggccggagacaacccgtacctcaagtacaaccacgccgacgccgagttc |
| | | | caggagcggctcaaagaagatacgtcttttgggggcaacctcgggcgagc |
| | | | agtcttccaggccaaaaagaggcttcttgaacctcttggtctggttgagg |
| | | | aagcggctaagacggctcctggaaagaagaggcctgtagagcagtctcct |
| | | | caggaaccggactcctccgcgggtattggcaaatcgggtgcacagcccgc |
| | | | taaaaagagactcaatttcggtcagactggcgacacagagtcagtcccag |
| | | | accctcaaccaatcggagaacctcccgcagccccctaggtgtgggatctc |
| | | | ttacaatggcttcaggtggtggcgcaccagtggcagacaataacgaaggt |
| | | | gccgatggagtgggtagttcctcgggaaattggcattgcgattcccaatg |
| | | | gctgggggacagagtcatcaccaccagcacccgaacctgggccctgccca |
| | | | cctacaacaatcacctctacaagcaaatctccaacagcacatctggagga |
| | | | tcttcaaatgacaacgcctacttcggctacagcaccccctgggggtattt |
| | | | tgacttcaacagattccactgccacttctcaccacgtgactggcagcgac |
| | | | tcatcaacaacaactggggattccggcctaagcgactcaacttcaagctc |
| | | | ttcaacattcaggtcaaagaggttacggacaacaatggagtcaagaccat |
| | | | cgccaataaccttaccagcacggtccaggtcttcacggactcagactatc |
| | | | agctcccgtacgtgctcgggtcggctcacgagggctgcctcccgccgttc |
| | | | ccagcggacgttttcatgattcctcagtacgggtatctgacgcttaatga |
| | | | tggaagccaggccgtgggtcgttcgtccttttactgcctggaatatttcc |
| | | | cgtcgcaaatgctaagaacgggtaacaacttccagttcagctacgagttt |
| | | | gagaacgtacctttccatagcagctacgctcacagccaaagcctggaccg |
| | | | actaatgaatccactcatcgaccaatacttgtactatctctcTaGAacta |
| | | | ttAACGGTTCTGGACAGAATCAAcaaacgctaaaattcagtgtggccgga |
| | | | cccagcaacatggctgtccagggaagaaactacatacctggacccagcta |
| | | | ccgacaacaacgtgtctcaaccactgtgactcaaaacaacaacagcgaat |
| | | | ttgcttggcctggagcttcttcttgggctctcaatggacgtaatagcttg |
| | | | atgaatcctggacctgctatggccagccacaaagaaggagaggaccgttt |
| | | | ctttcctttgtctggatctttaatttttggcaaacaaggTacCggCagag |
| | | | acaacgtggatgcggacaaagtcatgataaccaacgaagaagaaattaaa |
| | | | actactaacccggtagcaacggagtcctatggacaagtggccacaaacca |
| | | | ccagagtGCGCAAAAAAACTCGCCATCGGAATTTGCCCAGGCTCAGaccg |
| | | | gttgggttcaaaaccaaggaatacttccgggtatggtttggcaggacaga |
| | | | gatgtgtacctgcaaggacccatttgggccaaaattcctcacacggacgg |
| | | | caactttcacccttctccgctgatgggagggtttggaatgaagcacccgc |
| | | | ctcctcagatcctcatcaaaaacacacctgtacctgcggatcctccaacg |
| | | | gccttcaacaaggacaagctgaactctttcatcacccagtattctactgg |
| | | | ccaagtcagcgtggagatcgagtgggagctgcagaaggaaaacagcaagc |
| | | | gctggaacccggagatccagtacacttccaactattacaagtctaataat |
| | | | gttgaatttgctgttaatactgaaggtgtatatagtgaaccccgccccat |
| | | | tggcaccagatacctgactcgtaatctg |
| 117 | DNA | Adeno- | atggctgccgatggttatcttccagattggctcgaggacaaccttagtga |
| | | Associated | aggaattcgcgagtggtgggctttgaaacctggagcccctcaacccaagg |
| | | Virus 9 | caaatcaacaacatcaagacaacgctcgaggtcttgtgcttccgggttac |
| | | comprising | aaataccttggacccggcaacggactcgacaagggggagccggtcaacgc |
| | | SEQ | agcagacgcggcggccctcgagcacgacaaggcctacgaccagcagctca |
| | | ID NO: 10 | aggrcggagacaacccgtacctcaagtacaaccacgccgacgccgagttc |
| | | | caggagcggctcaaagaagatacgtcttttgggggcaacctcgggcgagc |
| | | | agtcttccaggccaaaaagaggcttcttgaacctcttggtctggttgagg |
| | | | aagcggctaagacggctcctggaaagaagaggcctgtagagcagtctcct |
| | | | caggaaccggactcctccgcgggtattggcaaatcgggtgcacagcccgc |
| | | | taaaaagagactcaatttcggtcagactggcgacacagagtcagtcccag |
| | | | accctcaaccaatcggagaacctcccgcagccccctcaggtgtgggatct |
| | | | cttacaatggcttcaggtggtggcgcaccagtggcagacaataacgaagg |
| | | | tgccgatggagtgggtagttcctcgggaaattggcattgcgattcccaat |
| | | | ggctgggggacagagtcatcaccaccagcacccgaacctgggccctgccc |
| | | | acctacaacaatcacctctacaagcaaatctccaacagcacatctggagg |
| | | | atcttcaaatgacaacgcctacttcggctacagcaccccctgggggtatt |
| | | | ttgacttcaacagattccactgccacttctcaccacgtgactggcagcga |
| | | | ctcatcaacaacaactggggattccggcctaagcgactcaacttcaagct |
| | | | cttcaacattcaggtcaaagaggttacggacaacaatggagtcaagacca |
| | | | tcgccaataaccttaccagcacggtccaggtcttcacggactcagactat |
| | | | cagctcccgtacgtgctcgggtcggctcacgagggctgcctcccgccgtt |
| | | | cccagcggacgttttcatgattcctcagtacgggtatctgacgcttaatg |
| | | | atggaagccaggccgtgggtcgttcgtccttttactgcctggaatatttc |
| | | | ccgtcgcaaatgctaagaacgggtaacaacttccagttcagctacgagtt |
| | | | tgagaacgtacctttccatagcagctacgctcacagccaaagcctggacc |
| | | | gactaatgaatccactcatcgaccaatacttgtactatctctcTaGAact |
| | | | attAACGGTTCTGGACAGAATCAAcaaacgctaaaattcagtgtggccgg |
| | | | acccagcaacatggctgtccagggaagaaactacatacctggacccagct |
| | | | accgacaacaacgtgtctcaaccactgtgactcaaaacaacaacagcgaa |
| | | | tttgcttggcctggagcttcttcttgggctctcaatggacgtaatagctt |
| | | | gatgaatcctggacctgctatggccagccacaaagaaggagaggaccgtt |
| | | | tctttcctttgtctggatctttaatttttggcaaacaaggTacCggCaga |
| | | | gacaacgtggatgcggacaaagtcatgataaccaacgaagaagaaattaa |
| | | | aactactaacccggtagcaacggagtcctatggacaagtggccacaaacc |
| | | | accagagtGCACAGAAGAACTCCCCATCAGAGTTTGCCCAAGCCCAAacc |
| | | | ggttgggttcaaaaccaaggaatacttccgggtatggtttggcaggacag |
| | | | agatgtgtacctgcaaggacccatttgggccaaaattcctcacacggacg |
| | | | gcaactttcacccttctccgctgatgggagggtttggaatgaagcacccg |
| | | | cctcctcagatcctcatcaaaaacacacctgtacctgcggatcctccaac |
| | | | ggccttcaacaaggacaagctgaactctttcatcacccagtattctactg |
| | | | gccaagtcagcgtggagatcgagtgggagctgcagaaggaaaacagcaag |
| | | | cgctggaacccggagatccagtacacttccaactattacaagtctaataa |
| | | | tgttgaatttgctgttaatactgaaggtgtatatagtgaaccccgcccca |
| | | | ttggcaccagatacctgactcgtaatctg |
| 118 | DNA | Adeno- | atggctgccgatggttatcttccagattggctcgaggacaaccttagtga |
| | | Associated | aggaattcgcgagtggtgggctttgaaacctggagcccctcaacccaagg |
| | | Virus 9 | caaatcaacaacatcaagacaacgctcgaggtcttgtgcttccgggttac |
| | | comprising | aaataccttggacccggcaacggactcgacaagggggagccggtcaacgc |
| | | SEQ | agcagacgcggcggccctcgagcacgacaaggcctacgaccagcagctca |
| | | ID NO: 10 | aggccggagacaacccgtacctcaagtacaaccacgccgacgccgagttc |
| | | | caggagcggctcaaagaagatacgtcttttgggggcaacctcgggcgagc |
| | | | agtcttccaggccaaaaagaggcttcttgaacctcttggtctggttgagg |
| | | | aagcggctaagacggctcctggaaagaagaggcctgtagagcagtctcct |
| | | | caggaaccggactcctccgcgggtattggcaaatcgggtgcacagcccgc |
| | | | taaaaagagactcaatttcggtcagactggcgacacagagtcagtcccag |
| | | | accctcaaccaatcggagaacctcccgcagccccctcaggtgtgggatct |
| | | | cttacaatggcttcaggtggtggcgcaccagtggcagacaataacgaagg |
| | | | tgccgatggagtgggtagttcctcgggaaattggcattgcgattcccaat |
| | | | ggctgggggacagagtcatcaccaccagcacccgaacctgggccctgccc |
| | | | acctacaacaatcacctctacaagcaaatctccaacagcacatctggagg |
| | | | atcttcaaatgacaacgcctacttcggctacagcaccccctgggggtatt |
| | | | ttgacttcaacagattccactgccacttctcaccacgtgactggcagcga |
| | | | ctcatcaacaacaactggggattccggcctaagcgactcaacttcaagct |
| | | | cttcaacattcaggtcaaagaggttacggacaacaatggagtcaagacca |
| | | | tcgccaataaccttaccagcacggtccaggtcttcacggactcagactat |
| | | | cagctcccgtacgtgctcgggtcggctcacgagggctgcctcccgccgtt |
| | | | cccagcggacgttttcatgattcctcagtacgggtatctgacgcttaatg |
| | | | atggaagccaggccgtgggtcgttcgtccttttactgcctggaatatttc |
| | | | ccgtcgcaaatgctaagaacgggtaacaacttccagttcagctacgagtt |
| | | | tgagaacgtacctttccatagcagctacgctcacagccaaagcctggacc |
| | | | gactaatgaatccactcatcgaccaatacttgtactatctctcTaGAact |
| | | | attAACGGTTCTGGACAGAATCAAcaaacgctaaaattcagtgtggccgg |
| | | | acccagcaacatggctgtccagggaagaaactacatacctggacccagct |
| | | | accgacaacaacgtgtctcaaccactgtgactcaaaacaacaacagcgaa |
| | | | tttgcttggcctggagcttcttcttgggctctcaatggacgtaatagctt |
| | | | gatgaatcctggacctgctatggccagccacaaagaaggagaggaccgtt |
| | | | tctttcctttgtctggatctttaatttttggcaaacaaggTacCggCaga |
| | | | gacaacgtggatgcggacaaagtcatgataaccaacgaagaagaaattaa |
| | | | aactactaacccggtagcaacggagtcctatggacaagtggccacaaacc |
| | | | accagagtGCCCAAAAAAATAGTCCCAGCGAATTCGCGCAGGCGCAGacc |
| | | | ggttgggttcaaaaccaaggaatacttccgggtatggtttggcaggacag |
| | | | agatgtgtacctgcaaggacccatttgggccaaaattcctcacacggacg |
| | | | gcaactttcacccttctccgctgatgggagggtttggaatgaagcacccg |
| | | | cctcctcagatcctcatcaaaaacacacctgtacctgcggatcctccaac |
| | | | ggccttcaacaaggacaagctgaactctttcatcacccagtattctactg |
| | | | gccaagtcagcgtggagatcgagtgggagctgcagaaggaaaacagcaag |
| | | | cgctggaacccggagatccagtacacttccaactattacaagtctaataa |
| | | | tgttgaatttgctgttaatactgaaggtgtatatagtgaaccccgcccca |
| | | | ttggcaccagatacctgactcgtaatctg |
| 119 | DNA | Adeno- | atggctgccgatggttatcttccagattggctcgaggacaaccttagtga |
| | | Associated | aggaattcgcgagtggtgggctttgaaacctggagcccctcaacccaagg |
| | | Virus 9 | caaatcaacaacatcaagacaacgctcgaggtcttgtgcttccgggttac |
| | | comprising | aaataccttggacccggcaacggactcgacaagggggagccggtcaacgc |
| | | SEQ | agcagacgcggcggccctcgagcacgacaaggcctacgaccagcagctca |
| | | ID NO: 10 | aggccggagacaacccgtacctcaagtacaaccacgccgacgccgagttc |
| | | | caggagcggctcaaagaagatacgtcttttgggggcaacctcgggcgagc |
| | | | agtcttccaggccaaaaagaggcttcttgaacctcttggtctggttgagg |
| | | | aagcggctaagacggctcctggaaagaagaggcctgtagagcagtctcct |
| | | | caggaaccggactcctccgcgggtattggcaaatcgggtgcacagcccgc |
| | | | taaaaagagactcaatttcggtcagactggcgacacagagtcagtcccag |
| | | | accctcaaccaatcggagaacctcccgcagccccctcaggtgtgggatct |
| | | | cttacaatggcttcaggtggtggcgcaccagtggcagacaataacgaagg |
| | | | tgccgatggagtgggtagttcctcgggaaattggcattgcgattcccaat |
| | | | ggctgggggacagagtcatcaccaccagcacccgaacctgggccctgccc |
| | | | acctacaacaatcacctctacaagcaaatctccaacagcacatctggagg |
| | | | atcttcaaatgacaacgcctacttcggctacagcaccccctgggggtatt |
| | | | ttgacttcaacagattccactgccacttctcaccacgtgactggcagcga |
| | | | ctcatcaacaacaactggggattccggcctaagcgactcaacttcaagct |
| | | | cttcaacattcaggtcaaagaggttacggacaacaatggagtcaagacca |
| | | | tcgccaataaccttaccagcacggtccaggtcttcacggactcagactat |
| | | | cagctcccgtacgtgctcgggtcggctcacgagggctgcctcccgccgtt |
| | | | cccagcggacgttttcatgattcctcagtacgggtatctgacgcttaatg |
| | | | atggaagccaggccgtgggtcgttcgtccttttactgcctggaatatttc |
| | | | ccgtcgcaaatgctaagaacgggtaacaacttccagttcagctacgagtt |
| | | | tgagaacgtacctttccatagcagctacgctcacagccaaagcctggacc |
| | | | gactaatgaatccactcatcgaccaatacttgtactatctctcTaGAact |
| | | | attAACGGTTCTGGACAGAATCAAcaaacgctaaaattcagtgtggccgg |
| | | | acccagcaacatggctgtccagggaagaaactacatacctggacccagct |
| | | | accgacaacaacgtgtctcaaccactgtgactcaaaacaacaacagcgaa |
| | | | tttgcttggcctggagcttcttcttgggctctcaatggacgtaatagctt |
| | | | gatgaatcctggacctgctatggccagccacaaagaaggagaggaccgtt |
| | | | tctttcctttgtctggatctttaatttttggcaaacaaggTacCggCaga |
| | | | gacaacgtggatgcggacaaagtcatgataaccaacgaagaagaaattaa |
| | | | aactactaacccggtagcaacggagtcctatggacaagtggccacaaacc |
| | | | accagagtGCACAGAAGAATAGCCCTAGCGAGTTCGCGCAAGCCCAAacc |
| | | | ggttgggttcaaaaccaaggaatacttccgggtatggtttggcaggacag |
| | | | agatgtgtacctgcaaggacccatttgggccaaaattcctcacacggacg |
| | | | gcaactttcacccttctccgctgatgggagggtttggaatgaagcacccg |
| | | | cctcctcagatcctcatcaaaaacacacctgtacctgcggatcctccaac |
| | | | ggccttcaacaaggacaagctgaactctttcatcacccagtattctactg |
| | | | gccaagtcagcgtggagatcgagtgggagctgcagaaggaaaacagcaag |
| | | | cgctggaacccggagatccagtacacttccaactattacaagtctaataa |
| | | | tgttgaatttgctgttaatactgaaggtgtatatagtgaaccccgcccca |
| | | | ttggcaccagatacctgactcgtaatctg |
| 120 | DNA | Adeno- | atggctgccgatggttatcttccagattggctcgaggacaaccttagtga |
| | | Associated | aggaattcgcgagtggtgggctttgaaacctggagcccctcaacccaagg |
| | | Virus 9 | caaatcaacaacatcaagacaacgctcgaggtcttgtgcttccgggttac |
| | | comprising | aaataccttggacccggcaacggactcgacaagggggagccggtcaacgc |
| | | SEQ | agcagacgcggcggccctcgagcacgacaaggcctacgaccagcagctca |
| | | ID NO: 10 | aggccggagacaacccgtacctcaagtacaaccacgccgacgccgagttc |
| | | | caggagcggctcaaagaagatacgtcttttgggggcaacctcgggcgagc |
| | | | agtcttccaggccaaaaagaggcttcttgaacctcttggtctggttgagg |
| | | | aagcggctaagacggctcctggaaagaagaggcctgtagagcagtctcct |
| | | | caggaaccggactcctccgcgggtattggcaaatcgggtgcacagcccgc |
| | | | taaaaagagactcaatttcggtcagactggcgacacagagtcagtcccag |
| | | | accctcaaccaatcggagaacctcccgcagccccctcaggtgtgggatct |
| | | | cttacaatggcttcaggtggtggcgcaccagtggcagacaataacgaagg |
| | | | tgccgatggagtgggtagttcctcgggaaattggcattgcgattcccaat |
| | | | ggctgggggacagagtcatcaccaccagcacccgaacctgggccctgccc |
| | | | acctacaacaatcacctctacaagcaaatctccaacagcacatctggagg |
| | | | atcttcaaatgacaacgcctacttcggctacagcaccccctgggggtatt |
| | | | ttgacttcaacagattccactgccacttctcaccacgtgactggcagcga |
| | | | ctcatcaacaacaactggggattccggcctaagcgactcaacttcaagct |
| | | | cttcaacattcaggtcaaagaggttacggacaacaatggagtcaagacca |
| | | | tcgccaataaccttaccagcacggtccaggtcttcacggactcagactat |
| | | | cagctcccgtacgtgctcgggtcggctcacgagggctgcctcccgccgtt |
| | | | cccagcggacgttttcatgattcctcagtacgggtatctgacgcttaatg |
| | | | atggaagccaggccgtgggtcgttcgtccttttactgcctggaatatttc |
| | | | ccgtcgcaaatgctaagaacgggtaacaacttccagttcagctacgagtt |
| | | | tgagaacgtacctttccatagcagctacgctcacagccaaagcctggacc |
| | | | gactaatgaatccactcatcgaccaatacttgtactatctctcTaGAact |
| | | | attAACGGTTCTGGACAGAATCAAcaaacgctaaaattcagtgtggccgg |
| | | | acccagcaacatggctgtccagggaagaaactacatacctggacccagct |
| | | | accgacaacaacgtgtctcaaccactgtgactcaaaacaacaacagcgaa |
| | | | tttgcttggcctggagcttcttcttgggctctcaatggacgtaatagctt |
| | | | gatgaatcctggacctgctatggccagccacaaagaaggagaggaccgtt |
| | | | tctttcctttgtctggatctttaatttttggcaaacaaggTacCggCaga |
| | | | gacaacgtggatgcggacaaagtcatgataaccaacgaagaagaaattaa |
| | | | aactactaacccggtagcaacggagtcctatggacaagtggccacaaacc |
| | | | accagagtGCGCAAAAGAACTCCCCATCAGAATTTGCGCAAGCCCAGacc |
| | | | ggttgggttcaaaaccaaggaatacttccgggtatggtttggcaggacag |
| | | | agatgtgtacctgcaaggacccatttgggccaaaattcctcacacggacg |
| | | | gcaactttcacccttctccgctgatgggagggtttggaatgaagcacccg |
| | | | cctcctcagatcctcatcaaaaacacacctgtacctgcggatcctccaac |
| | | | ggccttcaacaaggacaagctgaactctttcatcacccagtattctactg |
| | | | gccaagtcagcgtggagatcgagtgggagctgcagaaggaaaacagcaag |
| | | | cgctggaacccggagatccagtacacttccaactattacaagtctaataa |
| | | | tgttgaatttgctgttaatactgaaggtgtatatagtgaaccccgcccca |
| | | | ttggcaccagatacctgactcgtaatctg |
| 121 | DNA | Adeno- | atggctgccgatggttatcttccagattggctcgaggacaaccttagtga |
| | | Associated | aggaattcgcgagtggtgggctttgaaacctggagcccctcaacccaagg |
| | | Virus 9 | caaatcaacaacatcaagacaacgctcgaggtcttgtgcttccgggttac |
| | | comprising | aaataccttggacccggcaacggactcgacaagggggagccggtcaacgc |
| | | SEQ | agcagacgcggcggccctcgagcacgacaaggcctacgaccagcagctca |
| | | ID NO: 11 | aggrcggagacaacccgtacctcaagtacaaccacgccgacgccgagttc |
| | | | caggagcggctcaaagaagatacgtcttttgggggcaacctcgggcgagc |
| | | | agtcttccaggccaaaaagaggcttcttgaacctcttggtctggttgagg |
| | | | aagcggctaagacggctcctggaaagaagaggcctgtagagcagtctcct |
| | | | caggaaccggactcctccgcgggtattggcaaatcgggtgcacagcccgc |
| | | | taaaaagagactcaatttcggtcagactggcgacacagagtcagtcccag |
| | | | accctcaaccaatcggagaacctcccgcagccccctcaggtgtgggatct |
| | | | cttacaatggcttcaggtggtggcgcaccagtggcagacaataacgaagg |
| | | | tgccgatggagtgggtagttcctcgggaaattggcattgcgattcccaat |
| | | | ggctgggggacagagtcatcaccaccagcacccgaacctgggccctgccc |
| | | | acctacaacaatcacctctacaagcaaatctccaacagcacatctggagg |
| | | | atcttcaaatgacaacgcctacttcggctacagcaccccctgggggtatt |
| | | | ttgacttcaacagattccactgccacttctcaccacgtgactggcagcga |
| | | | ctcatcaacaacaactggggattccggcctaagcgactcaacttcaagct |
| | | | cttcaacattcaggtcaaagaggttacggacaacaatggagtcaagacca |
| | | | tcgccaataaccttaccagcacggtccaggtcttcacggactcagactat |
| | | | cagctcccgtacgtgctcgggtcggctcacgagggctgcctcccgccgtt |
| | | | cccagcggacgttttcatgattcctcagtacgggtatctgacgcttaatg |
| | | | atggaagccaggccgtgggtcgttcgtccttttactgcctggaatatttc |
| | | | ccgtcgcaaatgctaagaacgggtaacaacttccagttcagctacgagtt |
| | | | tgagaacgtacctttccatagcagctacgctcacagccaaagcctggacc |
| | | | gactaatgaatccactcatcgaccaatacttgtactatctctcTaGAact |
| | | | attAACGGTTCTGGACAGAATCAAcaaacgctaaaattcagtgtggccgg |
| | | | acccagcaacatggctgtccagggaagaaactacatacctggacccagct |
| | | | accgacaacaacgtgtctcaaccactgtgactcaaaacaacaacagcgaa |
| | | | tttgcttggcctggagcttcttcttgggctctcaatggacgtaatagctt |
| | | | gatgaatcctggacctgctatggccagccacaaagaaggagaggaccgtt |
| | | | tctttcctttgtctggatctttaatttttggcaaacaaggTacCggCaga |
| | | | gacaacgtggatgcggacaaagtcatgataaccaacgaagaagaaattaa |
| | | | aactactaacccggtagcaacggagtcctatggacaagtggccacaaacc |
| | | | accagagtGCACAGTTAGCCTTGCCTCAGGAGTTCGCCCAGGCACAAacc |
| | | | ggttgggttcaaaaccaaggaatacttccgggtatggtttggcaggacag |
| | | | agatgtgtacctgcaaggacccatttgggccaaaattcctcacacggacg |
| | | | gcaactttcacccttctccgctgatgggagggtttggaatgaagcacccg |
| | | | cctcctcagatcctcatcaaaaacacacctgtacctgcggatcctccaac |
| | | | ggccttcaacaaggacaagctgaactctttcatcacccagtattctactg |
| | | | gccaagtcagcgtggagatcgagtgggagctgcagaaggaaaacagcaag |
| | | | cgctggaacccggagatccagtacacttccaactattacaagtctaataa |
| | | | tgttgaatttgctgttaatactgaaggtgtatatagtgaaccccgcccca |
| | | | ttggcaccagatacctgactcgtaatctg |
| 122 | DNA | Adeno- | atggctgccgatggttatcttccagattggctcgaggacaaccttagtga |
| | | Associated | aggaattcgcgagtggtgggctttgaaacctggagcccctcaacccaagg |
| | | Virus 9 | caaatcaacaacatcaagacaacgctcgaggtcttgtgcttccgggttac |
| | | comprising | aaataccttggacccggcaacggactcgacaagggggagccggtcaacgc |
| | | SEQ | agcagacgcggcggccctcgagcacgacaaggcctacgaccagcagctca |
| | | ID NO: 11 | aggccggagacaacccgtacctcaagtacaaccacgccgacgccgagttc |
| | | | caggagcggctcaaagaagatacgtcttttgggggcaacctcgggcgagc |
| | | | agtcttccaggccaaaaagaggcttcttgaacctcttggtctggttgagg |
| | | | aagcggctaagacggctcctggaaagaagaggcctgtagagcagtctcct |
| | | | caggaaccggactcctccgcgggtattggcaaatcgggtgcacagcccgc |
| | | | taaaaagagactcaatttcggtcagactggcgacacagagtcagtcccag |
| | | | accctcaaccaatcggagaacctcccgcagccccctcaggtgtgggatct |
| | | | cttacaatggcttcaggtggtggcgcaccagtggcagacaataacgaagg |
| | | | tgccgatggagtgggtagttcctcgggaaattggcattgcgattcccaat |
| | | | ggctgggggacagagtcatcaccaccagcacccgaacctgggccctgccc |
| | | | acctacaacaatcacctctacaagcaaatctccaacagcacatctggagg |
| | | | atcttcaaatgacaacgcctacttcggctacagcaccccctgggggtatt |
| | | | ttgacttcaacagattccactgccacttctcaccacgtgactggcagcga |
| | | | ctcatcaacaacaactggggattccggcctaagcgactcaacttcaagct |
| | | | cttcaacattcaggtcaaagaggttacggacaacaatggagtcaagacca |
| | | | tcgccaataaccttaccagcacggtccaggtcttcacggactcagactat |
| | | | cagctcccgtacgtgctcgggtcggctcacgagggctgcctcccgccgtt |
| | | | cccagcggacgttttcatgattcctcagtacgggtatctgacgcttaatg |
| | | | atggaagccaggccgtgggtcgttcgtccttttactgcctggaatatttc |
| | | | ccgtcgcaaatgctaagaacgggtaacaacttccagttcagctacgagtt |
| | | | tgagaacgtacctttccatagcagctacgctcacagccaaagcctggacc |
| | | | gactaatgaatccactcatcgaccaatacttgtactatctctcTaGAact |
| | | | attAACGGTTCTGGACAGAATCAAcaaacgctaaaattcagtgtggccgg |
| | | | acccagcaacatggctgtccagggaagaaactacatacctggacccagct |
| | | | accgacaacaacgtgtctcaaccactgtgactcaaaacaacaacagcgaa |
| | | | tttgcttggcctggagcttcttcttgggctctcaatggacgtaatagctt |
| | | | gatgaatcctggacctgctatggccagccacaaagaaggagaggaccgtt |
| | | | tctttcctttgtctggatctttaatttttggcaaacaaggTacCggCaga |
| | | | gacaacgtggatgcggacaaagtcatgataaccaacgaagaagaaattaa |
| | | | aactactaacccggtagcaacggagtcctatggacaagtggccacaaacc |
| | | | accagagtGCCCAATTGGCCTTACCTCAGGAATTCGCGCAAGCGCAGacc |
| | | | ggttgggttcaaaaccaaggaatacttccgggtatggtttggcaggacag |
| | | | agatgtgtacctgcaaggacccatttgggccaaaattcctcacacggacg |
| | | | gcaactttcacccttctccgctgatgggagggtttggaatgaagcacccg |
| | | | cctcctcagatcctcatcaaaaacacacctgtacctgcggatcctccaac |
| | | | ggccttcaacaaggacaagctgaactctttcatcacccagtattctactg |
| | | | gccaagtcagcgtggagatcgagtgggagctgcagaaggaaaacagcaag |
| | | | cgctggaacccggagatccagtacacttccaactattacaagtctaataa |
| | | | tgttgaatttgctgttaatactgaaggtgtatatagtgaaccccgcccca |
| | | | ttggcaccagatacctgactcgtaatctg |
| 123 | DNA | Adeno- | atggctgccgatggttatcttccagattggctcgaggacaaccttagtga |
| | | Associated | aggaattcgcgagtggtgggctttgaaacctggagcccctcaacccaagg |
| | | Virus 9 | caaatcaacaacatcaagacaacgctcgaggtcttgtgcttccgggttac |
| | | comprising | aaataccttggacccggcaacggactcgacaagggggagccggtcaacgc |
| | | SEQ | agcagacgcggcggccctcgagcacgacaaggcctacgaccagcagctca |
| | | ID NO: 11 | aggccggagacaacccgtacctcaagtacaaccacgccgacgccgagttc |
| | | | caggagcggctcaaagaagatacgtcttttgggggcaacctcgggcgagc |
| | | | agtcttccaggccaaaaagaggcttcttgaacctcttggtctggttgagg |
| | | | aagcggctaagacggctcctggaaagaagaggcctgtagagcagtctcct |
| | | | caggaaccggactcctccgcgggtattggcaaatcgggtgcacagcccgc |
| | | | taaaaagagactcaatttcggtcagactggcgacacagagtcagtcccag |
| | | | accctcaaccaatcggagaacctcccgcagccccctcaggtgtgggatct |
| | | | cttacaatggcttcaggtggtggcgcaccagtggcagacaataacgaagg |
| | | | tgccgatggagtgggtagttcctcgggaaattggcattgcgattcccaat |
| | | | ggctgggggacagagtcatcaccaccagcacccgaacctgggccctgccc |
| | | | acctacaacaatcacctctacaagcaaatctccaacagcacatctggagg |
| | | | atcttcaaatgacaacgcctacttcggctacagcaccccctgggggtatt |
| | | | ttgacttcaacagattccactgccacttctcaccacgtgactggcagcga |
| | | | ctcatcaacaacaactggggattccggcctaagcgactcaacttcaagct |
| | | | cttcaacattcaggtcaaagaggttacggacaacaatggagtcaagacca |
| | | | tcgccaataaccttaccagcacggtccaggtcttcacggactcagactat |
| | | | cagctcccgtacgtgctcgggtcggctcacgagggctgcctcccgccgtt |
| | | | cccagcggacgttttcatgattcctcagtacgggtatctgacgcttaatg |
| | | | atggaagccaggccgtgggtcgttcgtccttttactgcctggaatatttc |
| | | | ccgtcgcaaatgctaagaacgggtaacaacttccagttcagctacgagtt |
| | | | tgagaacgtacctttccatagcagctacgctcacagccaaagcctggacc |
| | | | gactaatgaatccactcatcgaccaatacttgtactatctctcTaGAact |
| | | | attAACGGTTCTGGACAGAATCAAcaaacgctaaaattcagtgtggccgg |
| | | | acccagcaacatggctgtccagggaagaaactacatacctggacccagct |
| | | | accgacaacaacgtgtctcaaccactgtgactcaaaacaacaacagcgaa |
| | | | tttgcttggcctggagcttcttcttgggctctcaatggacgtaatagctt |
| | | | gatgaatcctggacctgctatggccagccacaaagaaggagaggaccgtt |
| | | | tctttcctttgtctggatctttaatttttggcaaacaaggTacCggCaga |
| | | | gacaacgtggatgcggacaaagtcatgataaccaacgaagaagaaattaa |
| | | | aactactaacccggtagcaacggagtcctatggacaagtggccacaaacc |
| | | | accagagtGCTCAACTAGCGCTGCCACAAGAATTTGCACAAGCTCAGacc |
| | | | ggttgggttcaaaaccaaggaatacttccgggtatggtttggcaggacag |
| | | | agatgtgtacctgcaaggacccatttgggccaaaattcctcacacggacg |
| | | | gcaactttcacccttctccgctgatgggagggtttggaatgaagcacccg |
| | | | cctcctcagatcctcatcaaaaacacacctgtacctgcggatcctccaac |
| | | | ggccttcaacaaggacaagctgaactctttcatcacccagtattctactg |
| | | | gccaagtcagcgtggagatcgagtgggagctgcagaaggaaaacagcaag |
| | | | cgctggaacccggagatccagtacacttccaactattacaagtctaataa |
| | | | tgttgaatttgctgttaatactgaaggtgtatatagtgaaccccgcccca |
| | | | ttggcaccagatacctgactcgtaatctg |
| 124 | DNA | Adeno- | atggctgccgatggttatcttccagattggctcgaggacaaccttagtga |
| | | Associated | aggaattcgcgagtggtgggctttgaaacctggagcccctcaacccaagg |
| | | Virus 9 | caaatcaacaacatcaagacaacgctcgaggtcttgtgcttccgggttac |
| | | comprising | aaataccttggacccggcaacggactcgacaagggggagccggtcaacgc |
| | | SEQ | agcagacgcggcggccctcgagcacgacaaggcctacgaccagcagctca |
| | | ID NO: 11 | aggccggagacaacccgtacctcaagtacaaccacgccgacgccgagttc |
| | | | caggagcggctcaaagaagatacgtcttttgggggcaacctcgggcgagc |
| | | | agtcttccaggccaaaaagaggcttcttgaacctcttggtctggttgagg |
| | | | aagcggctaagacggctcctggaaagaagaggcctgtagagcagtctcct |
| | | | caggaaccggactcctccgcgggtattggcaaatcgggtgcacagcccgc |
| | | | taaaaagagactcaatttcggtcagactggcgacacagagtcagtcccag |
| | | | accctcaaccaatcggagaacctcccgcagccccctcaggtgtgggatct |
| | | | cttacaatggcttcaggtggtggcgcaccagtggcagacaataacgaagg |
| | | | tgccgatggagtgggtagttcctcgggaaattggcattgcgattcccaat |
| | | | ggctgggggacagagtcatcaccaccagcacccgaacctgggccctgccc |
| | | | acctacaacaatcacctctacaagcaaatctccaacagcacatctggagg |
| | | | atcttcaaatgacaacgcctacttcggctacagcaccccctgggggtatt |
| | | | ttgacttcaacagattccactgccacttctcaccacgtgactggcagcga |
| | | | ctcatcaacaacaactggggattccggcctaagcgactcaacttcaagct |
| | | | cttcaacattcaggtcaaagaggttacggacaacaatggagtcaagacca |
| | | | tcgccaataaccttaccagcacggtccaggtcttcacggactcagactat |
| | | | cagctcccgtacgtgctcgggtcggctcacgagggctgcctcccgccgtt |
| | | | cccagcggacgttttcatgattcctcagtacgggtatctgacgcttaatg |
| | | | atggaagccaggccgtgggtcgttcgtccttttactgcctggaatatttc |
| | | | ccgtcgcaaatgctaagaacgggtaacaacttccagttcagctacgagtt |
| | | | tgagaacgtacctttccatagcagctacgctcacagccaaagcctggacc |
| | | | gactaatgaatccactcatcgaccaatacttgtactatctctcTaGAact |
| | | | attAACGGTTCTGGACAGAATCAAcaaacgctaaaattcagtgtggccgg |
| | | | acccagcaacatggctgtccagggaagaaactacatacctggacccagct |
| | | | accgacaacaacgtgtctcaaccactgtgactcaaaacaacaacagcgaa |
| | | | tttgcttggcctggagcttcttcttgggctctcaatggacgtaatagctt |
| | | | gatgaatcctggacctgctatggccagccacaaagaaggagaggaccgtt |
| | | | tctttcctttgtctggatctttaatttttggcaaacaaggTacCggCaga |
| | | | gacaacgtggatgcggacaaagtcatgataaccaacgaagaagaaattaa |
| | | | aactactaacccggtagcaacggagtcctatggacaagtggccacaaacc |
| | | | accagagtGCGCAGCTTGCCCTCCCGCAAGAGTTCGCCCAAGCACAAacc |
| | | | ggttgggttcaaaaccaaggaatacttccgggtatggtttggcaggacag |
| | | | agatgtgtacctgcaaggacccatttgggccaaaattcctcacacggacg |
| | | | gcaactttcacccttctccgctgatgggagggtttggaatgaagcacccg |
| | | | cctcctcagatcctcatcaaaaacacacctgtacctgcggatcctccaac |
| | | | ggccttcaacaaggacaagctgaactctttcatcacccagtattctactg |
| | | | gccaagtcagcgtggagatcgagtgggagctgcagaaggaaaacagcaag |
| | | | cgctggaacccggagatccagtacacttccaactattacaagtctaataa |
| | | | tgttgaatttgctgttaatactgaaggtgtatatagtgaaccccgcccca |
| | | | ttggcaccagatacctgactcgtaatctg |
| 125 | DNA | Adeno- | atggctgccgatggttatcttccagattggctcgaggacaaccttagtga |
| | | Associated | aggaattcgcgagtggtgggctttgaaacctggagcccctcaacccaagg |
| | | Virus 9 | caaatcaacaacatcaagacaacgctcgaggtcttgtgcttccgggttac |
| | | comprising | aaataccttggacccggcaacggactcgacaagggggagccggtcaacgc |
| | | SEQ | agcagacgcggcggccctcgagcacgacaaggcctacgaccagcagctca |
| | | ID NO: 11 | aggccggagacaacccgtacctcaagtacaaccacgccgacgccgagttc |
| | | | caggagcggctcaaagaagatacgtcttttgggggcaacctcgggcgagc |
| | | | agtcttccaggccaaaaagaggcttcttgaacctcttggtctggttgagg |
| | | | aagcggctaagacggctcctggaaagaagaggcctgtagagcagtctcct |
| | | | caggaaccggactcctccgcgggtattggcaaatcgggtgcacagcccgc |
| | | | taaaaagagactcaatttcggtcagactggcgacacagagtcagtcccag |
| | | | accctcaaccaatcggagaacctcccgcagccccctcaggtgtgggatct |
| | | | cttacaatggcttcaggtggtggcgcaccagtggcagacaataacgaagg |
| | | | tgccgatggagtgggtagttcctcgggaaattggcattgcgattcccaat |
| | | | ggctgggggacagagtcatcaccaccagcacccgaacctgggccctgccc |
| | | | acctacaacaatcacctctacaagcaaatctccaacagcacatctggagg |
| | | | atcttcaaatgacaacgcctacttcggctacagcaccccctgggggtatt |
| | | | ttgacttcaacagattccactgccacttctcaccacgtgactggcagcga |
| | | | ctcatcaacaacaactggggattccggcctaagcgactcaacttcaagct |
| | | | cttcaacattcaggtcaaagaggttacggacaacaatggagtcaagacca |
| | | | tcgccaataaccttaccagcacggtccaggtcttcacggactcagactat |
| | | | cagctcccgtacgtgctcgggtcggctcacgagggctgcctcccgccgtt |
| | | | cccagcggacgttttcatgattcctcagtacgggtatctgacgcttaatg |
| | | | atggaagccaggccgtgggtcgttcgtccttttactgcctggaatatttc |
| | | | ccgtcgcaaatgctaagaacgggtaacaacttccagttcagctacgagtt |
| | | | tgagaacgtacctttccatagcagctacgctcacagccaaagcctggacc |
| | | | gactaatgaatccactcatcgaccaatacttgtactatctctcTaGAact |
| | | | attAACGGTTCTGGACAGAATCAAcaaacgctaaaattcagtgtggccgg |
| | | | acccagcaacatggctgtccagggaagaaactacatacctggacccagct |
| | | | accgacaacaacgtgtctcaaccactgtgactcaaaacaacaacagcgaa |
| | | | tttgcttggcctggagcttcttcttgggctctcaatggacgtaatagctt |
| | | | gatgaatcctggacctgctatggccagccacaaagaaggagaggaccgtt |
| | | | tctttcctttgtctggatctttaatttttggcaaacaaggTacCggCaga |
| | | | gacaacgtggatgcggacaaagtcatgataaccaacgaagaagaaattaa |
| | | | aactactaacccggtagcaacggagtcctatggacaagtggccacaaacc |
| | | | accagagtGCTCAATTGGCACTACCGCAGGAGTTTGCACAGGCGCAGacc |
| | | | ggttgggttcaaaaccaaggaatacttccgggtatggtttggcaggacag |
| | | | agatgtgtacctgcaaggacccatttgggccaaaattcctcacacggacg |
| | | | gcaactttcacccttctccgctgatgggagggtttggaatgaagcacccg |
| | | | cctcctcagatcctcatcaaaaacacacctgtacctgcggatcctccaac |
| | | | ggccttcaacaaggacaagctgaactctttcatcacccagtattctactg |
| | | | gccaagtcagcgtggagatcgagtgggagctgcagaaggaaaacagcaag |
| | | | cgctggaacccggagatccagtacacttccaactattacaagtctaataa |
| | | | tgttgaatttgctgttaatactgaaggtgtatatagtgaaccccgcccca |
| | | | ttggcaccagatacctgactcgtaatctg |
| 126 | DNA | Adeno- | atggctgccgatggttatcttccagattggctcgaggacaaccttagtga |
| | | Associated | aggaattcgcgagtggtgggctttgaaacctggagcccctcaacccaagg |
| | | Virus 9 | caaatcaacaacatcaagacaacgctcgaggtcttgtgcttccgggttac |
| | | comprising | aaataccttggacccggcaacggactcgacaagggggagccggtcaacgc |
| | | SEQ | agcagacgcggcggccctcgagcacgacaaggcctacgaccagcagctca |
| | | ID NO: 11 | aggrcggagacaacccgtacctcaagtacaaccacgccgacgccgagttc |
| | | | caggagcggctcaaagaagatacgtcttttgggggcaacctcgggcgagc |
| | | | agtcttccaggccaaaaagaggcttcttgaacctcttggtctggttgagg |
| | | | aagcggctaagacggctcctggaaagaagaggcctgtagagcagtctcct |
| | | | caggaaccggactcctccgcgggtattggcaaatcgggtgcacagcccgc |
| | | | taaaaagagactcaatttcggtcagactggcgacacagagtcagtcccag |
| | | | accctcaaccaatcggagaacctcccgcagccccctcaggtgtgggatct |
| | | | cttacaatggcttcaggtggtggcgcaccagtggcagacaataacgaagg |
| | | | tgccgatggagtgggtagttcctcgggaaattggcattgcgattcccaat |
| | | | ggctgggggacagagtcatcaccaccagcacccgaacctgggccctgccc |
| | | | acctacaacaatcacctctacaagcaaatctccaacagcacatctggagg |
| | | | atcttcaaatgacaacgcctacttcggctacagcaccccctgggggtatt |
| | | | ttgacttcaacagattccactgccacttctcaccacgtgactggcagcga |
| | | | ctcatcaacaacaactggggattccggcctaagcgactcaacttcaagct |
| | | | cttcaacattcaggtcaaagaggttacggacaacaatggagtcaagacca |
| | | | tcgccaataaccttaccagcacggtccaggtcttcacggactcagactat |
| | | | cagctcccgtacgtgctcgggtcggctcacgagggctgcctcccgccgtt |
| | | | cccagcggacgttttcatgattcctcagtacgggtatctgacgcttaatg |
| | | | atggaagccaggccgtgggtcgttcgtccttttactgcctggaatatttc |
| | | | ccgtcgcaaatgctaagaacgggtaacaacttccagttcagctacgagtt |
| | | | tgagaacgtacctttccatagcagctacgctcacagccaaagcctggacc |
| | | | gactaatgaatccactcatcgaccaatacttgtactatctctcTaGAact |
| | | | attAACGGTTCTGGACAGAATCAAcaaacgctaaaattcagtgtggccgg |
| | | | acccagcaacatggctgtccagggaagaaactacatacctggacccagct |
| | | | accgacaacaacgtgtctcaaccactgtgactcaaaacaacaacagcgaa |
| | | | tttgcttggcctggagcttcttcttgggctctcaatggacgtaatagctt |
| | | | gatgaatcctggacctgctatggccagccacaaagaaggagaggaccgtt |
| | | | tctttcctttgtctggatctttaatttttggcaaacaaggTacCggCaga |
| | | | gacaacgtggatgcggacaaagtcatgataaccaacgaagaagaaattaa |
| | | | aactactaacccggtagcaacggagtcctatggacaagtggccacaaacc |
| | | | accagagtGCTCAACTAGCTTTACCACAGGAATTTGCTCAGGCGCAGacc |
| | | | ggttgggttcaaaaccaaggaatacttccgggtatggtttggcaggacag |
| | | | agatgtgtacctgcaaggacccatttgggccaaaattcctcacacggacg |
| | | | gcaactttcacccttctccgctgatgggagggtttggaatgaagcacccg |
| | | | cctcctcagatcctcatcaaaaacacacctgtacctgcggatcctccaac |
| | | | ggccttcaacaaggacaagctgaactctttcatcacccagtattctactg |
| | | | gccaagtcagcgtggagatcgagtgggagctgcagaaggaaaacagcaag |
| | | | cgctggaacccggagatccagtacacttccaactattacaagtctaataa |
| | | | tgttgaatttgctgttaatactgaaggtgtatatagtgaaccccgcccca |
| | | | ttggcaccagatacctgactcgtaatctg |
| 127 | DNA | Adeno- | atggctgccgatggttatcttccagattggctcgaggacaaccttagtga |
| | | Associated | aggaattcgcgagtggtgggctttgaaacctggagcccctcaacccaagg |
| | | Virus 9 | caaatcaacaacatcaagacaacgctcgaggtcttgtgcttccgggttac |
| | | comprising | aaataccttggacccggcaacggactcgacaagggggagccggtcaacgc |
| | | SEQ | agcagacgcggcggccctcgagcacgacaaggcctacgaccagcagctca |
| | | ID NO: 11 | aggrcggagacaacccgtacctcaagtacaaccacgccgacgccgagttc |
| | | | caggagcggctcaaagaagatacgtcttttgggggcaacctcgggcgagc |
| | | | agtcttccaggccaaaaagaggcttcttgaacctcttggtctggttgagg |
| | | | aagcggctaagacggctcctggaaagaagaggcctgtagagcagtctcct |
| | | | caggaaccggactcctccgcgggtattggcaaatcgggtgcacagcccgc |
| | | | taaaaagagactcaatttcggtcagactggcgacacagagtcagtcccag |
| | | | accctcaaccaatcggagaacctcccgcagccccctcaggtgtgggatct |
| | | | cttacaatggcttcaggtggtggcgcaccagtggcagacaataacgaagg |
| | | | tgccgatggagtgggtagttcctcgggaaattggcattgcgattcccaat |
| | | | ggctgggggacagagtcatcaccaccagcacccgaacctgggccctgccc |
| | | | acctacaacaatcacctctacaagcaaatctccaacagcacatctggagg |
| | | | atcttcaaatgacaacgcctacttcggctacagcaccccctgggggtatt |
| | | | ttgacttcaacagattccactgccacttctcaccacgtgactggcagcga |
| | | | ctcatcaacaacaactggggattccggcctaagcgactcaacttcaagct |
| | | | cttcaacattcaggtcaaagaggttacggacaacaatggagtcaagacca |
| | | | tcgccaataaccttaccagcacggtccaggtcttcacggactcagactat |
| | | | cagctcccgtacgtgctcgggtcggctcacgagggctgcctcccgccgtt |
| | | | cccagcggacgttttcatgattcctcagtacgggtatctgacgcttaatg |
| | | | atggaagccaggccgtgggtcgttcgtccttttactgcctggaatatttc |
| | | | ccgtcgcaaatgctaagaacgggtaacaacttccagttcagctacgagtt |
| | | | tgagaacgtacctttccatagcagctacgctcacagccaaagcctggacc |
| | | | gactaatgaatccactcatcgaccaatacttgtactatctctcTaGAact |
| | | | attAACGGTTCTGGACAGAATCAAcaaacgctaaaattcagtgtggccgg |
| | | | acccagcaacatggctgtccagggaagaaactacatacctggacccagct |
| | | | accgacaacaacgtgtctcaaccactgtgactcaaaacaacaacagcgaa |
| | | | tttgcttggcctggagcttcttcttgggctctcaatggacgtaatagctt |
| | | | gatgaatcctggacctgctatggccagccacaaagaaggagaggaccgtt |
| | | | tctttcctttgtctggatctttaatttttggcaaacaaggTacCggCaga |
| | | | gacaacgtggatgcggacaaagtcatgataaccaacgaagaagaaattaa |
| | | | aactactaacccggtagcaacggagtcctatggacaagtggccacaaacc |
| | | | accagagtGCTCAGCTAGCGCTACCCCAAGAGTTTGCTCAGGCCCAAacc |
| | | | ggttgggttcaaaaccaaggaatacttccgggtatggtttggcaggacag |
| | | | agatgtgtacctgcaaggacccatttgggccaaaattcctcacacggacg |
| | | | gcaactttcacccttctccgctgatgggagggtttggaatgaagcacccg |
| | | | cctcctcagatcctcatcaaaaacacacctgtacctgcggatcctccaac |
| | | | ggccttcaacaaggacaagctgaactctttcatcacccagtattctactg |
| | | | gccaagtcagcgtggagatcgagtgggagctgcagaaggaaaacagcaag |
| | | | cgctggaacccggagatccagtacacttccaactattacaagtctaataa |
| | | | tgttgaatttgctgttaatactgaaggtgtatatagtgaaccccgcccca |
| | | | ttggcaccagatacctgactcgtaatctg |
| 128 | DNA | Adeno- | atggctgccgatggttatcttccagattggctcgaggacaaccttagtga |
| | | Associated | aggaattcgcgagtggtgggctttgaaacctggagcccctcaacccaagg |
| | | Virus 9 | caaatcaacaacatcaagacaacgctcgaggtcttgtgcttccgggttac |
| | | comprising | aaataccttggacccggcaacggactcgacaagggggagccggtcaacgc |
| | | SEQ | agcagacgcggcggccctcgagcacgacaaggcctacgaccagcagctca |
| | | ID NO: 11 | aggccggagacaacccgtacctcaagtacaaccacgccgacgccgagttc |
| | | | caggagcggctcaaagaagatacgtcttttgggggcaacctcgggcgagc |
| | | | agtcttccaggccaaaaagaggcttcttgaacctcttggtctggttgagg |
| | | | aagcggctaagacggctcctggaaagaagaggcctgtagagcagtctcct |
| | | | caggaaccggactcctccgcgggtattggcaaatcgggtgcacagcccgc |
| | | | taaaaagagactcaatttcggtcagactggcgacacagagtcagtcccag |
| | | | accctcaaccaatcggagaacctcccgcagccccctcaggtgtgggatct |
| | | | cttacaatggcttcaggtggtggcgcaccagtggcagacaataacgaagg |
| | | | tgccgatggagtgggtagttcctcgggaaattggcattgcgattcccaat |
| | | | ggctgggggacagagtcatcaccaccagcacccgaacctgggccctgccc |
| | | | acctacaacaatcacctctacaagcaaatctccaacagcacatctggagg |
| | | | atcttcaaatgacaacgcctacttcggctacagcaccccctgggggtatt |
| | | | ttgacttcaacagattccactgccacttctcaccacgtgactggcagcga |
| | | | ctcatcaacaacaactggggattccggcctaagcgactcaacttcaagct |
| | | | cttcaacattcaggtcaaagaggttacggacaacaatggagtcaagacca |
| | | | tcgccaataaccttaccagcacggtccaggtcttcacggactcagactat |
| | | | cagctcccgtacgtgctcgggtcggctcacgagggctgcctcccgccgtt |
| | | | cccagcggacgttttcatgattcctcagtacgggtatctgacgcttaatg |
| | | | atggaagccaggccgtgggtcgttcgtccttttactgcctggaatatttc |
| | | | ccgtcgcaaatgctaagaacgggtaacaacttccagttcagctacgagtt |
| | | | tgagaacgtacctttccatagcagctacgctcacagccaaagcctggacc |
| | | | gactaatgaatccactcatcgaccaatacttgtactatctctcTaGAact |
| | | | attAACGGTTCTGGACAGAATCAAcaaacgctaaaattcagtgtggccgg |
| | | | acccagcaacatggctgtccagggaagaaactacatacctggacccagct |
| | | | accgacaacaacgtgtctcaaccactgtgactcaaaacaacaacagcgaa |
| | | | tttgcttggcctggagcttcttcttgggctctcaatggacgtaatagctt |
| | | | gatgaatcctggacctgctatggccagccacaaagaaggagaggaccgtt |
| | | | tctttcctttgtctggatctttaatttttggcaaacaaggTacCggCaga |
| | | | gacaacgtggatgcggacaaagtcatgataaccaacgaagaagaaattaa |
| | | | aactactaacccggtagcaacggagtcctatggacaagtggccacaaacc |
| | | | accagagtGCCCAACTTGCTCTTCCTCAGGAGTTTGCTCAAGCGCAGacc |
| | | | ggttgggttcaaaaccaaggaatacttccgggtatggtttggcaggacag |
| | | | agatgtgtacctgcaaggacccatttgggccaaaattcctcacacggacg |
| | | | gcaactttcacccttctccgctgatgggagggtttggaatgaagcacccg |
| | | | cctcctcagatcctcatcaaaaacacacctgtacctgcggatcctccaac |
| | | | ggccttcaacaaggacaagctgaactctttcatcacccagtattctactg |
| | | | gccaagtcagcgtggagatcgagtgggagctgcagaaggaaaacagcaag |
| | | | cgctggaacccggagatccagtacacttccaactattacaagtctaataa |
| | | | tgttgaatttgctgttaatactgaaggtgtatatagtgaaccccgcccca |
| | | | ttggcaccagatacctgactcgtaatctg |
| 129 | DNA | Adeno- | atggctgccgatggttatcttccagattggctcgaggacaaccttagtga |
| | | Associated | aggaattcgcgagtggtgggctttgaaacctggagcccctcaacccaagg |
| | | Virus 9 | caaatcaacaacatcaagacaacgctcgaggtcttgtgcttccgggttac |
| | | comprising | aaataccttggacccggcaacggactcgacaagggggagccggtcaacgc |
| | | SEQ | agcagacgcggcggccctcgagcacgacaaggcctacgaccagcagctca |
| | | ID NO: 11 | aggccggagacaacccgtacctcaagtacaaccacgccgacgccgagttc |
| | | | caggagcggctcaaagaagatacgtcttttgggggcaacctcgggcgagc |
| | | | agtcttccaggccaaaaagaggcttcttgaacctcttggtctggttgagg |
| | | | aagcggctaagacggctcctggaaagaagaggcctgtagagcagtctcct |
| | | | caggaaccggactcctccgcgggtattggcaaatcgggtgcacagcccgc |
| | | | taaaaagagactcaatttcggtcagactggcgacacagagtcagtcccag |
| | | | accctcaaccaatcggagaacctcccgcagccccctcaggtgtgggatct |
| | | | cttacaatggcttcaggtggtggcgcaccagtggcagacaataacgaagg |
| | | | tgccgatggagtgggtagttcctcgggaaattggcattgcgattcccaat |
| | | | ggctgggggacagagtcatcaccaccagcacccgaacctgggccctgccc |
| | | | acctacaacaatcacctctacaagcaaatctccaacagcacatctggagg |
| | | | atcttcaaatgacaacgcctacttcggctacagcaccccctgggggtatt |
| | | | ttgacttcaacagattccactgccacttctcaccacgtgactggcagcga |
| | | | ctcatcaacaacaactggggattccggcctaagcgactcaacttcaagct |
| | | | cttcaacattcaggtcaaagaggttacggacaacaatggagtcaagacca |
| | | | tcgccaataaccttaccagcacggtccaggtcttcacggactcagactat |
| | | | cagctcccgtacgtgctcgggtcggctcacgagggctgcctcccgccgtt |
| | | | cccagcggacgttttcatgattcctcagtacgggtatctgacgcttaatg |
| | | | atggaagccaggccgtgggtcgttcgtccttttactgcctggaatatttc |
| | | | ccgtcgcaaatgctaagaacgggtaacaacttccagttcagctacgagtt |
| | | | tgagaacgtacctttccatagcagctacgctcacagccaaagcctggacc |
| | | | gactaatgaatccactcatcgaccaatacttgtactatctctcTaGAact |
| | | | attAACGGTTCTGGACAGAATCAAcaaacgctaaaattcagtgtggccgg |
| | | | acccagcaacatggctgtccagggaagaaactacatacctggacccagct |
| | | | accgacaacaacgtgtctcaaccactgtgactcaaaacaacaacagcgaa |
| | | | tttgcttggcctggagcttcttcttgggctctcaatggacgtaatagctt |
| | | | gatgaatcctggacctgctatggccagccacaaagaaggagaggaccgtt |
| | | | tctttcctttgtctggatctttaatttttggcaaacaaggTacCggCaga |
| | | | gacaacgtggatgcggacaaagtcatgataaccaacgaagaagaaattaa |
| | | | aactactaacccggtagcaacggagtcctatggacaagtggccacaaacc |
| | | | accagagtGCGCAGTTGGCGCTACCCCAAGAATTCGCCCAGGCTCAAacc |
| | | | ggttgggttcaaaaccaaggaatacttccgggtatggtttggcaggacag |
| | | | agatgtgtacctgcaaggacccatttgggccaaaattcctcacacggacg |
| | | | gcaactttcacccttctccgctgatgggagggtttggaatgaagcacccg |
| | | | cctcctcagatcctcatcaaaaacacacctgtacctgcggatcctccaac |
| | | | ggccttcaacaaggacaagctgaactctttcatcacccagtattctactg |
| | | | gccaagtcagcgtggagatcgagtgggagctgcagaaggaaaacagcaag |
| | | | cgctggaacccggagatccagtacacttccaactattacaagtctaataa |
| | | | tgttgaatttgctgttaatactgaaggtgtatatagtgaaccccgcccca |
| | | | ttggcaccagatacctgactcgtaatctg |
| 130 | DNA | Adeno- | atggctgccgatggttatcttccagattggctcgaggacaaccttagtga |
| | | Associated | aggaattcgcgagtggtgggctttgaaacctggagcccctcaacccaagg |
| | | Virus 9 | caaatcaacaacatcaagacaacgctcgaggtcttgtgcttccgggttac |
| | | comprising | aaataccttggacccggcaacggactcgacaagggggagccggtcaacgc |
| | | SEQ | agcagacgcggcggccctcgagcacgacaaggcctacgaccagcagctca |
| | | ID NO: 11 | aggccggagacaacccgtacctcaagtacaaccacgccgacgccgagttc |
| | | | caggagcggctcaaagaagatacgtcttttgggggcaacctcgggcgagc |
| | | | agtcttccaggccaaaaagaggcttcttgaacctcttggtctggttgagg |
| | | | aagcggctaagacggctcctggaaagaagaggcctgtagagcagtctcct |
| | | | caggaaccggactcctccgcgggtattggcaaatcgggtgcacagcccgc |
| | | | taaaaagagactcaatttcggtcagactggcgacacagagtcagtcccag |
| | | | accctcaaccaatcggagaacctcccgcagccccctcaggtgtgggatct |
| | | | cttacaatggcttcaggtggtggcgcaccagtggcagacaataacgaagg |
| | | | tgccgatggagtgggtagttcctcgggaaattggcattgcgattcccaat |
| | | | ggctgggggacagagtcatcaccaccagcacccgaacctgggccctgccc |
| | | | acctacaacaatcacctctacaagcaaatctccaacagcacatctggagg |
| | | | atcttcaaatgacaacgcctacttcggctacagcaccccctgggggtatt |
| | | | ttgacttcaacagattccactgccacttctcaccacgtgactggcagcga |
| | | | ctcatcaacaacaactggggattccggcctaagcgactcaacttcaagct |
| | | | cttcaacattcaggtcaaagaggttacggacaacaatggagtcaagacca |
| | | | tcgccaataaccttaccagcacggtccaggtcttcacggactcagactat |
| | | | cagctcccgtacgtgctcgggtcggctcacgagggctgcctcccgccgtt |
| | | | cccagcggacgttttcatgattcctcagtacgggtatctgacgcttaatg |
| | | | atggaagccaggccgtgggtcgttcgtccttttactgcctggaatatttc |
| | | | ccgtcgcaaatgctaagaacgggtaacaacttccagttcagctacgagtt |
| | | | tgagaacgtacctttccatagcagctacgctcacagccaaagcctggacc |
| | | | gactaatgaatccactcatcgaccaatacttgtactatctctcTaGAact |
| | | | attAACGGTTCTGGACAGAATCAAcaaacgctaaaattcagtgtggccgg |
| | | | acccagcaacatggctgtccagggaagaaactacatacctggacccagct |
| | | | accgacaacaacgtgtctcaaccactgtgactcaaaacaacaacagcgaa |
| | | | tttgcttggcctggagcttcttcttgggctctcaatggacgtaatagctt |
| | | | gatgaatcctggacctgctatggccagccacaaagaaggagaggaccgtt |
| | | | tctttcctttgtctggatctttaatttttggcaaacaaggTacCggCaga |
| | | | gacaacgtggatgcggacaaagtcatgataaccaacgaagaagaaattaa |
| | | | aactactaacccggtagcaacggagtcctatggacaagtggccacaaacc |
| | | | accagagtGCCCAGCTCGCCCTCCCACAAGAATTCGCTCAAGCCCAAacc |
| | | | ggttgggttcaaaaccaaggaatacttccgggtatggtttggcaggacag |
| | | | agatgtgtacctgcaaggacccatttgggccaaaattcctcacacggacg |
| | | | gcaactttcacccttctccgctgatgggagggtttggaatgaagcacccg |
| | | | cctcctcagatcctcatcaaaaacacacctgtacctgcggatcctccaac |
| | | | ggccttcaacaaggacaagctgaactctttcatcacccagtattctactg |
| | | | gccaagtcagcgtggagatcgagtgggagctgcagaaggaaaacagcaag |
| | | | cgctggaacccggagatccagtacacttccaactattacaagtctaataa |
| | | | tgttgaatttgctgttaatactgaaggtgtatatagtgaaccccgcccca |
| | | | ttggcaccagatacctgactcgtaatctg |
| 131 | DNA | Adeno- | atggctgccgatggttatcttccagattggctcgaggacaaccttagtga |
| | | Associated | aggaattcgcgagtggtgggctttgaaacctggagcccctcaacccaagg |
| | | Virus 9 | caaatcaacaacatcaagacaacgctcgaggtcttgtgcttccgggttac |
| | | comprising | aaataccttggacccggcaacggactcgacaagggggagccggtcaacgc |
| | | SEQ | agcagacgcggcggccctcgagcacgacaaggcctacgaccagcagctca |
| | | ID NO: 12 | aggccggagacaacccgtacctcaagtacaaccacgccgacgccgagttc |
| | | | caggagcggctcaaagaagatacgtcttttgggggcaacctcgggcgagc |
| | | | agtcttccaggccaaaaagaggcttcttgaacctcttggtctggttgagg |
| | | | aagcggctaagacggctcctggaaagaagaggcctgtagagcagtctcct |
| | | | caggaaccggactcctccgcgggtattggcaaatcgggtgcacagcccgc |
| | | | taaaaagagactcaatttcggtcagactggcgacacagagtcagtcccag |
| | | | accctcaaccaatcggagaacctcccgcagccccctcaggtgtgggatct |
| | | | cttacaatggcttcaggtggtggcgcaccagtggcagacaataacgaagg |
| | | | tgccgatggagtgggtagttcctcgggaaattggcattgcgattcccaat |
| | | | ggctgggggacagagtcatcaccaccagcacccgaacctgggccctgccc |
| | | | acctacaacaatcacctctacaagcaaatctccaacagcacatctggagg |
| | | | atcttcaaatgacaacgcctacttcggctacagcaccccctgggggtatt |
| | | | ttgacttcaacagattccactgccacttctcaccacgtgactggcagcga |
| | | | ctcatcaacaacaactggggattccggcctaagcgactcaacttcaagct |
| | | | cttcaacattcaggtcaaagaggttacggacaacaatggagtcaagacca |
| | | | tcgccaataaccttaccagcacggtccaggtcttcacggactcagactat |
| | | | cagctcccgtacgtgctcgggtcggctcacgagggctgcctcccgccgtt |
| | | | cccagcggacgttttcatgattcctcagtacgggtatctgacgcttaatg |
| | | | atggaagccaggccgtgggtcgttcgtccttttactgcctggaatatttc |
| | | | ccgtcgcaaatgctaagaacgggtaacaacttccagttcagctacgagtt |
| | | | tgagaacgtacctttccatagcagctacgctcacagccaaagcctggacc |
| | | | gactaatgaatccactcatcgaccaatacttgtactatctctcTaGAact |
| | | | attAACGGTTCTGGACAGAATCAAcaaacgctaaaattcagtgtggccgg |
| | | | acccagcaacatggctgtccagggaagaaactacatacctggacccagct |
| | | | accgacaacaacgtgtctcaaccactgtgactcaaaacaacaacagcgaa |
| | | | tttgcttggcctggagcttcttcttgggctctcaatggacgtaatagctt |
| | | | gatgaatcctggacctgctatggccagccacaaagaaggagaggaccgtt |
| | | | tctttcctttgtctggatctttaatttttggcaaacaaggTacCggCaga |
| | | | gacaacgtggatgcggacaaagtcatgataaccaacgaagaagaaattaa |
| | | | aactactaacccggtagcaacggagtcctatggacaagtggccacaaacc |
| | | | accagagtGCTCAACAGAATATCCCCTCTGAGTACGCACAAGCTCAAacc |
| | | | ggttgggttcaaaaccaaggaatacttccgggtatggtttggcaggacag |
| | | | agatgtgtacctgcaaggacccatttgggccaaaattcctcacacggacg |
| | | | gcaactttcacccttctccgctgatgggagggtttggaatgaagcacccg |
| | | | cctcctcagatcctcatcaaaaacacacctgtacctgcggatcctccaac |
| | | | ggccttcaacaaggacaagctgaactctttcatcacccagtattctactg |
| | | | gccaagtcagcgtggagatcgagtgggagctgcagaaggaaaacagcaag |
| | | | cgctggaacccggagatccagtacacttccaactattacaagtctaataa |
| | | | tgttgaatttgctgttaatactgaaggtgtatatagtgaaccccgcccca |
| | | | ttggcaccagatacctgactcgtaatctg |
| 132 | DNA | Adeno- | atggctgccgatggttatcttccagattggctcgaggacaaccttagtga |
| | | Associated | aggaattcgcgagtggtgggctttgaaacctggagcccctcaacccaagg |
| | | Virus 9 | caaatcaacaacatcaagacaacgctcgaggtcttgtgcttccgggttac |
| | | comprising | aaataccttggacccggcaacggactcgacaagggggagccggtcaacgc |
| | | SEQ | agcagacgcggcggccctcgagcacgacaaggcctacgaccagcagctca |
| | | ID NO: 12 | aggrcggagacaacccgtacctcaagtacaaccacgccgacgccgagttc |
| | | | caggagcggctcaaagaagatacgtcttttgggggcaacctcgggcgagc |
| | | | agtcttccaggccaaaaagaggcttcttgaacctcttggtctggttgagg |
| | | | aagcggctaagacggctcctggaaagaagaggcctgtagagcagtctcct |
| | | | caggaaccggactcctccgcgggtattggcaaatcgggtgcacagcccgc |
| | | | taaaaagagactcaatttcggtcagactggcgacacagagtcagtcccag |
| | | | accctcaaccaatcggagaacctcccgcagccccctcaggtgtgggatct |
| | | | cttacaatggcttcaggtggtggcgcaccagtggcagacaataacgaagg |
| | | | tgccgatggagtgggtagttcctcgggaaattggcattgcgattcccaat |
| | | | ggctgggggacagagtcatcaccaccagcacccgaacctgggccctgccc |
| | | | acctacaacaatcacctctacaagcaaatctccaacagcacatctggagg |
| | | | atcttcaaatgacaacgcctacttcggctacagcaccccctgggggtatt |
| | | | ttgacttcaacagattccactgccacttctcaccacgtgactggcagcga |
| | | | ctcatcaacaacaactggggattccggcctaagcgactcaacttcaagct |
| | | | cttcaacattcaggtcaaagaggttacggacaacaatggagtcaagacca |
| | | | tcgccaataaccttaccagcacggtccaggtcttcacggactcagactat |
| | | | cagctcccgtacgtgctcgggtcggctcacgagggctgcctcccgccgtt |
| | | | cccagcggacgttttcatgattcctcagtacgggtatctgacgcttaatg |
| | | | atggaagccaggccgtgggtcgttcgtccttttactgcctggaatatttc |
| | | | ccgtcgcaaatgctaagaacgggtaacaacttccagttcagctacgagtt |
| | | | tgagaacgtacctttccatagcagctacgctcacagccaaagcctggacc |
| | | | gactaatgaatccactcatcgaccaatacttgtactatctctcTaGAact |
| | | | attAACGGTTCTGGACAGAATCAAcaaacgctaaaattcagtgtggccgg |
| | | | acccagcaacatggctgtccagggaagaaactacatacctggacccagct |
| | | | accgacaacaacgtgtctcaaccactgtgactcaaaacaacaacagcgaa |
| | | | tttgcttggcctggagcttcttcttgggctctcaatggacgtaatagctt |
| | | | gatgaatcctggacctgctatggccagccacaaagaaggagaggaccgtt |
| | | | tctttcctttgtctggatctttaatttttggcaaacaaggTacCggCaga |
| | | | gacaacgtggatgcggacaaagtcatgataaccaacgaagaagaaattaa |
| | | | aactactaacccggtagcaacggagtcctatggacaagtggccacaaacc |
| | | | accagagtGCACAGCAAAACATTCCGTCAGAATATGCCCAGGCACAGacc |
| | | | ggttgggttcaaaaccaaggaatacttccgggtatggtttggcaggacag |
| | | | agatgtgtacctgcaaggacccatttgggccaaaattcctcacacggacg |
| | | | gcaactttcacccttctccgctgatgggagggtttggaatgaagcacccg |
| | | | cctcctcagatcctcatcaaaaacacacctgtacctgcggatcctccaac |
| | | | ggccttcaacaaggacaagctgaactctttcatcacccagtattctactg |
| | | | gccaagtcagcgtggagatcgagtgggagctgcagaaggaaaacagcaag |
| | | | cgctggaacccggagatccagtacacttccaactattacaagtctaataa |
| | | | tgttgaatttgctgttaatactgaaggtgtatatagtgaaccccgcccca |
| | | | ttggcaccagatacctgactcgtaatctg |
| 133 | DNA | Adeno- | atggctgccgatggttatcttccagattggctcgaggacaaccttagtga |
| | | Associated | aggaattcgcgagtggtgggctttgaaacctggagcccctcaacccaagg |
| | | Virus 9 | caaatcaacaacatcaagacaacgctcgaggtcttgtgcttccgggttac |
| | | comprising | aaataccttggacccggcaacggactcgacaagggggagccggtcaacgc |
| | | SEQ | agcagacgcggcggccctcgagcacgacaaggcctacgaccagcagctca |
| | | ID NO: 12 | aggccggagacaacccgtacctcaagtacaaccacgccgacgccgagttc |
| | | | caggagcggctcaaagaagatacgtcttttgggggcaacctcgggcgagc |
| | | | agtcttccaggccaaaaagaggcttcttgaacctcttggtctggttgagg |
| | | | aagcggctaagacggctcctggaaagaagaggcctgtagagcagtctcct |
| | | | caggaaccggactcctccgcgggtattggcaaatcgggtgcacagcccgc |
| | | | taaaaagagactcaatttcggtcagactggcgacacagagtcagtcccag |
| | | | accctcaaccaatcggagaacctcccgcagccccctcaggtgtgggatct |
| | | | cttacaatggcttcaggtggtggcgcaccagtggcagacaataacgaagg |
| | | | tgccgatggagtgggtagttcctcgggaaattggcattgcgattcccaat |
| | | | ggctgggggacagagtcatcaccaccagcacccgaacctgggccctgccc |
| | | | acctacaacaatcacctctacaagcaaatctccaacagcacatctggagg |
| | | | atcttcaaatgacaacgcctacttcggctacagcaccccctgggggtatt |
| | | | ttgacttcaacagattccactgccacttctcaccacgtgactggcagcga |
| | | | ctcatcaacaacaactggggattccggcctaagcgactcaacttcaagct |
| | | | cttcaacattcaggtcaaagaggttacggacaacaatggagtcaagacca |
| | | | tcgccaataaccttaccagcacggtccaggtcttcacggactcagactat |
| | | | cagctcccgtacgtgctcgggtcggctcacgagggctgcctcccgccgtt |
| | | | cccagcggacgttttcatgattcctcagtacgggtatctgacgcttaatg |
| | | | atggaagccaggccgtgggtcgttcgtccttttactgcctggaatatttc |
| | | | ccgtcgcaaatgctaagaacgggtaacaacttccagttcagctacgagtt |
| | | | tgagaacgtacctttccatagcagctacgctcacagccaaagcctggacc |
| | | | gactaatgaatccactcatcgaccaatacttgtactatctctcTaGAact |
| | | | attAACGGTTCTGGACAGAATCAAcaaacgctaaaattcagtgtggccgg |
| | | | acccagcaacatggctgtccagggaagaaactacatacctggacccagct |
| | | | accgacaacaacgtgtctcaaccactgtgactcaaaacaacaacagcgaa |
| | | | tttgcttggcctggagcttcttcttgggctctcaatggacgtaatagctt |
| | | | gatgaatcctggacctgctatggccagccacaaagaaggagaggaccgtt |
| | | | tctttcctttgtctggatctttaatttttggcaaacaaggTacCggCaga |
| | | | gacaacgtggatgcggacaaagtcatgataaccaacgaagaagaaattaa |
| | | | aactactaacccggtagcaacggagtcctatggacaagtggccacaaacc |
| | | | accagagtGCCCAGCAAAACATACCCTCAGAATACGCACAGGCTCAGacc |
| | | | ggttgggttcaaaaccaaggaatacttccgggtatggtttggcaggacag |
| | | | agatgtgtacctgcaaggacccatttgggccaaaattcctcacacggacg |
| | | | gcaactttcacccttctccgctgatgggagggtttggaatgaagcacccg |
| | | | cctcctcagatcctcatcaaaaacacacctgtacctgcggatcctccaac |
| | | | ggccttcaacaaggacaagctgaactctttcatcacccagtattctactg |
| | | | gccaagtcagcgtggagatcgagtgggagctgcagaaggaaaacagcaag |
| | | | cgctggaacccggagatccagtacacttccaactattacaagtctaataa |
| | | | tgttgaatttgctgttaatactgaaggtgtatatagtgaaccccgcccca |
| | | | ttggcaccagatacctgactcgtaatctg |
| 134 | DNA | Adeno- | atggctgccgatggttatcttccagattggctcgaggacaaccttagtga |
| | | Associated | aggaattcgcgagtggtgggctttgaaacctggagcccctcaacccaagg |
| | | Virus 9 | caaatcaacaacatcaagacaacgctcgaggtcttgtgcttccgggttac |
| | | comprising | aaataccttggacccggcaacggactcgacaagggggagccggtcaacgc |
| | | SEQ | agcagacgcggcggccctcgagcacgacaaggcctacgaccagcagctca |
| | | ID NO: 12 | aggccggagacaacccgtacctcaagtacaaccacgccgacgccgagttc |
| | | | caggagcggctcaaagaagatacgtcttttgggggcaacctcgggcgagc |
| | | | agtcttccaggccaaaaagaggcttcttgaacctcttggtctggttgagg |
| | | | aagcggctaagacggctcctggaaagaagaggcctgtagagcagtctcct |
| | | | caggaaccggactcctccgcgggtattggcaaatcgggtgcacagcccgc |
| | | | taaaaagagactcaatttcggtcagactggcgacacagagtcagtcccag |
| | | | accctcaaccaatcggagaacctcccgcagccccctcaggtgtgggatct |
| | | | cttacaatggcttcaggtggtggcgcaccagtggcagacaataacgaagg |
| | | | tgccgatggagtgggtagttcctcgggaaattggcattgcgattcccaat |
| | | | ggctgggggacagagtcatcaccaccagcacccgaacctgggccctgccc |
| | | | acctacaacaatcacctctacaagcaaatctccaacagcacatctggagg |
| | | | atcttcaaatgacaacgcctacttcggctacagcaccccctgggggtatt |
| | | | ttgacttcaacagattccactgccacttctcaccacgtgactggcagcga |
| | | | ctcatcaacaacaactggggattccggcctaagcgactcaacttcaagct |
| | | | cttcaacattcaggtcaaagaggttacggacaacaatggagtcaagacca |
| | | | tcgccaataaccttaccagcacggtccaggtcttcacggactcagactat |
| | | | cagctcccgtacgtgctcgggtcggctcacgagggctgcctcccgccgtt |
| | | | cccagcggacgttttcatgattcctcagtacgggtatctgacgcttaatg |
| | | | atggaagccaggccgtgggtcgttcgtccttttactgcctggaatatttc |
| | | | ccgtcgcaaatgctaagaacgggtaacaacttccagttcagctacgagtt |
| | | | tgagaacgtacctttccatagcagctacgctcacagccaaagcctggacc |
| | | | gactaatgaatccactcatcgaccaatacttgtactatctctcTaGAact |
| | | | attAACGGTTCTGGACAGAATCAAcaaacgctaaaattcagtgtggccgg |
| | | | acccagcaacatggctgtccagggaagaaactacatacctggacccagct |
| | | | accgacaacaacgtgtctcaaccactgtgactcaaaacaacaacagcgaa |
| | | | tttgcttggcctggagcttcttcttgggctctcaatggacgtaatagctt |
| | | | gatgaatcctggacctgctatggccagccacaaagaaggagaggaccgtt |
| | | | tctttcctttgtctggatctttaatttttggcaaacaaggTacCggCaga |
| | | | gacaacgtggatgcggacaaagtcatgataaccaacgaagaagaaattaa |
| | | | aactactaacccggtagcaacggagtcctatggacaagtggccacaaacc |
| | | | accagagtGCTCAACAGAATATACCGAGCGAGTACGCGCAAGCTCAAacc |
| | | | ggttgggttcaaaaccaaggaatacttccgggtatggtttggcaggacag |
| | | | agatgtgtacctgcaaggacccatttgggccaaaattcctcacacggacg |
| | | | gcaactttcacccttctccgctgatgggagggtttggaatgaagcacccg |
| | | | cctcctcagatcctcatcaaaaacacacctgtacctgcggatcctccaac |
| | | | ggccttcaacaaggacaagctgaactctttcatcacccagtattctactg |
| | | | gccaagtcagcgtggagatcgagtgggagctgcagaaggaaaacagcaag |
| | | | cgctggaacccggagatccagtacacttccaactattacaagtctaataa |
| | | | tgttgaatttgctgttaatactgaaggtgtatatagtgaaccccgcccca |
| | | | ttggcaccagatacctgactcgtaatctg |
| 135 | DNA | Adeno- | atggctgccgatggttatcttccagattggctcgaggacaaccttagtga |
| | | Associated | aggaattcgcgagtggtgggctttgaaacctggagcccctcaacccaagg |
| | | Virus 9 | caaatcaacaacatcaagacaacgctcgaggtcttgtgcttccgggttac |
| | | comprising | aaataccttggacccggcaacggactcgacaagggggagccggtcaacgc |
| | | SEQ | agcagacgcggcggccctcgagcacgacaaggcctacgaccagcagctca |
| | | ID NO: 12 | aggccggagacaacccgtacctcaagtacaaccacgccgacgccgagttc |
| | | | caggagcggctcaaagaagatacgtcttttgggggcaacctcgggcgagc |
| | | | agtcttccaggccaaaaagaggcttcttgaacctcttggtctggttgagg |
| | | | aagcggctaagacggctcctggaaagaagaggcctgtagagcagtctcct |
| | | | caggaaccggactcctccgcgggtattggcaaatcgggtgcacagcccgc |
| | | | taaaaagagactcaatttcggtcagactggcgacacagagtcagtcccag |
| | | | accctcaaccaatcggagaacctcccgcagccccctcaggtgtgggatct |
| | | | cttacaatggcttcaggtggtggcgcaccagtggcagacaataacgaagg |
| | | | tgccgatggagtgggtagttcctcgggaaattggcattgcgattcccaat |
| | | | ggctgggggacagagtcatcaccaccagcacccgaacctgggccctgccc |
| | | | acctacaacaatcacctctacaagcaaatctccaacagcacatctggagg |
| | | | atcttcaaatgacaacgcctacttcggctacagcaccccctgggggtatt |
| | | | ttgacttcaacagattccactgccacttctcaccacgtgactggcagcga |
| | | | ctcatcaacaacaactggggattccggcctaagcgactcaacttcaagct |
| | | | cttcaacattcaggtcaaagaggttacggacaacaatggagtcaagacca |
| | | | tcgccaataaccttaccagcacggtccaggtcttcacggactcagactat |
| | | | cagctcccgtacgtgctcgggtcggctcacgagggctgcctcccgccgtt |
| | | | cccagcggacgttttcatgattcctcagtacgggtatctgacgcttaatg |
| | | | atggaagccaggccgtgggtcgttcgtccttttactgcctggaatatttc |
| | | | ccgtcgcaaatgctaagaacgggtaacaacttccagttcagctacgagtt |
| | | | tgagaacgtacctttccatagcagctacgctcacagccaaagcctggacc |
| | | | gactaatgaatccactcatcgaccaatacttgtactatctctcTaGAact |
| | | | attAACGGTTCTGGACAGAATCAAcaaacgctaaaattcagtgtggccgg |
| | | | acccagcaacatggctgtccagggaagaaactacatacctggacccagct |
| | | | accgacaacaacgtgtctcaaccactgtgactcaaaacaacaacagcgaa |
| | | | tttgcttggcctggagcttcttcttgggctctcaatggacgtaatagctt |
| | | | gatgaatcctggacctgctatggccagccacaaagaaggagaggaccgtt |
| | | | tctttcctttgtctggatctttaatttttggcaaacaaggTacCggCaga |
| | | | gacaacgtggatgcggacaaagtcatgataaccaacgaagaagaaattaa |
| | | | aactactaacccggtagcaacggagtcctatggacaagtggccacaaacc |
| | | | accagagtGCACAGCAAAACATCCCCTCGGAATATGCACAGGCACAGacc |
| | | | ggttgggttcaaaaccaaggaatacttccgggtatggtttggcaggacag |
| | | | agatgtgtacctgcaaggacccatttgggccaaaattcctcacacggacg |
| | | | gcaactttcacccttctccgctgatgggagggtttggaatgaagcacccg |
| | | | cctcctcagatcctcatcaaaaacacacctgtacctgcggatcctccaac |
| | | | ggccttcaacaaggacaagctgaactctttcatcacccagtattctactg |
| | | | gccaagtcagcgtggagatcgagtgggagctgcagaaggaaaacagcaag |
| | | | cgctggaacccggagatccagtacacttccaactattacaagtctaataa |
| | | | tgttgaatttgctgttaatactgaaggtgtatatagtgaaccccgcccca |
| | | | ttggcaccagatacctgactcgtaatctg |
| 136 | DNA | Adeno- | atggctgccgatggttatcttccagattggctcgaggacaaccttagtga |
| | | Associated | aggaattcgcgagtggtgggctttgaaacctggagcccctcaacccaagg |
| | | Virus 9 | caaatcaacaacatcaagacaacgctcgaggtcttgtgcttccgggttac |
| | | comprising | aaataccttggacccggcaacggactcgacaagggggagccggtcaacgc |
| | | SEQ | agcagacgggggccctcgagcacgacaaggcctacgaccagcagctcaag |
| | | ID NO: 12 | gccggagacaacccgtacctcaagtacaaccacgccgacgccgagttcca |
| | | | ggagcggctcaaagaagatacgtcttttgggggcaacctcgggcgagcag |
| | | | tcttccaggccaaaaagaggcttcttgaacctcttggtctggttgaggaa |
| | | | gcggctaagacggctcctggaaagaagaggcctgtagagcagtctcctca |
| | | | ggaaccggactcctccgcgggtattggcaaatcgggtgcacagcccgcta |
| | | | aaaagagactcaatttcggtcagactggcgacacagagtcagtcccagac |
| | | | cctcaaccaatcggagaacctcccgcagccccctcaggtgtgggatctct |
| | | | tacaatggcttcaggtggtggcgcaccagtggcagacaataacgaaggtg |
| | | | ccgatggagtgggtagttcctcgggaaattggcattgcgattcccaatgg |
| | | | ctgggggacagagtcatcaccaccagcacccgaacctgggccctgcccac |
| | | | ctacaacaatcacctctacaagcaaatctccaacagcacatctggaggat |
| | | | cttcaaatgacaacgcctacttcggctacagcaccccctgggggtatttt |
| | | | gacttcaacagattccactgccacttctcaccacgtgactggcagcgact |
| | | | catcaacaacaactggggattccggcctaagcgactcaacttcaagctct |
| | | | tcaacattcaggtcaaagaggttacggacaacaatggagtcaagaccatc |
| | | | gccaataaccttaccagcacggtccaggtcttcacggactcagactatca |
| | | | gctcccgtacgtgctcgggtcggctcacgagggctgcctcccgccgttcc |
| | | | cagcggacgttttcatgattcctcagtacgggtatctgacgcttaatgat |
| | | | ggaagccaggccgtgggtcgttcgtccttttactgcctggaatatttccc |
| | | | gtcgcaaatgctaagaacgggtaacaacttccagttcagctacgagtttg |
| | | | agaacgtacctttccatagcagctacgctcacagccaaagcctggaccga |
| | | | ctaatgaatccactcatcgaccaatacttgtactatctctcTaGAactat |
| | | | tAACGGTTCTGGACAGAATCAAcaaacgctaaaattcagtgtggccggac |
| | | | ccagcaacatggctgtccagggaagaaactacatacctggacccagctac |
| | | | cgacaacaacgtgtctcaaccactgtgactcaaaacaacaacagcgaatt |
| | | | tgcttggcctggagcttcttcttgggctctcaatggacgtaatagcttga |
| | | | tgaatcctggacctgctatggccagccacaaagaaggagaggaccgtttc |
| | | | tttcctttgtctggatctttaatttttggcaaacaaggTacCggCagaga |
| | | | caacgtggatgcggacaaagtcatgataaccaacgaagaagaaattaaaa |
| | | | ctactaacccggtagcaacggagtcctatggacaagtggccacaaaccac |
| | | | cagagtGCCCAGCAAAACATTCCTTCAGAATATGCACAGGCGCAGaccgg |
| | | | ttgggttcaaaaccaaggaatacttccgggtatggtttggcaggacagag |
| | | | atgtgtacctgcaaggacccatttgggccaaaattcctcacacggacggc |
| | | | aactttcacccttctccgctgatgggagggtttggaatgaagcacccgcc |
| | | | tcctcagatcctcatcaaaaacacacctgtacctgcggatcctccaacgg |
| | | | ccttcaacaaggacaagctgaactctttcatcacccagtattctactggc |
| | | | caagtcagcgtggagatcgagtgggagctgcagaaggaaaacagcaagcg |
| | | | ctggaacccggagatccagtacacttccaactattacaagtctaataatg |
| | | | ttgaatttgctgttaatactgaaggtgtatatagtgaaccccgccccatt |
| | | | ggcaccagatacctgactcgtaatctg |
| 137 | DNA | Adeno- | atggctgccgatggttatcttccagattggctcgaggacaaccttagtga |
| | | Associated | aggaattcgcgagtggtgggctttgaaacctggagcccctcaacccaagg |
| | | Virus 9 | caaatcaacaacatcaagacaacgctcgaggtcttgtgcttccgggttac |
| | | comprising | aaataccttggacccggcaacggactcgacaagggggagccggtcaacgc |
| | | SEQ | agcagacgcggcggccctcgagcacgacaaggcctacgaccagcagctca |
| | | ID NO: 12 | aggccggagacaacccgtacctcaagtacaaccacgccgacgccgagttc |
| | | | caggagcggctcaaagaagatacgtcttttgggggcaacctcgggcgagc |
| | | | agtcttccaggccaaaaagaggcttcttgaacctcttggtctggttgagg |
| | | | aagcggctaagacggctcctggaaagaagaggcctgtagagcagtctcct |
| | | | caggaaccggactcctccgcgggtattggcaaatcgggtgcacagcccgc |
| | | | taaaaagagactcaatttcggtcagactggcgacacagagtcagtcccag |
| | | | accctcaaccaatcggagaacctcccgcagccccctcaggtgtgggatct |
| | | | cttacaatggcttcaggtggtggcgcaccagtggcagacaataacgaagg |
| | | | tgccgatggagtgggtagttcctcgggaaattggcattgcgattcccaat |
| | | | ggctgggggacagagtcatcaccaccagcacccgaacctgggccctgccc |
| | | | acctacaacaatcacctctacaagcaaatctccaacagcacatctggagg |
| | | | atcttcaaatgacaacgcctacttcggctacagcaccccctgggggtatt |
| | | | ttgacttcaacagattccactgccacttctcaccacgtgactggcagcga |
| | | | ctcatcaacaacaactggggattccggcctaagcgactcaacttcaagct |
| | | | cttcaacattcaggtcaaagaggttacggacaacaatggagtcaagacca |
| | | | tcgccaataaccttaccagcacggtccaggtcttcacggactcagactat |
| | | | cagctcccgtacgtgctcgggtcggctcacgagggctgcctcccgccgtt |
| | | | cccagcggacgttttcatgattcctcagtacgggtatctgacgcttaatg |
| | | | atggaagccaggccgtgggtcgttcgtccttttactgcctggaatatttc |
| | | | ccgtcgcaaatgctaagaacgggtaacaacttccagttcagctacgagtt |
| | | | tgagaacgtacctttccatagcagctacgctcacagccaaagcctggacc |
| | | | gactaatgaatccactcatcgaccaatacttgtactatctctcTaGAact |
| | | | attAACGGTTCTGGACAGAATCAAcaaacgctaaaattcagtgtggccgg |
| | | | acccagcaacatggctgtccagggaagaaactacatacctggacccagct |
| | | | accgacaacaacgtgtctcaaccactgtgactcaaaacaacaacagcgaa |
| | | | tttgcttggcctggagcttcttcttgggctctcaatggacgtaatagctt |
| | | | gatgaatcctggacctgctatggccagccacaaagaaggagaggaccgtt |
| | | | tctttcctttgtctggatctttaatttttggcaaacaaggTacCggCaga |
| | | | gacaacgtggatgcggacaaagtcatgataaccaacgaagaagaaattaa |
| | | | aactactaacccggtagcaacggagtcctatggacaagtggccacaaacc |
| | | | accagagtGCTCAACAGAATATTCCGTCGGAGTATGCGCAAGCCCAAacc |
| | | | ggttgggttcaaaaccaaggaatacttccgggtatggtttggcaggacag |
| | | | agatgtgtacctgcaaggacccatttgggccaaaattcctcacacggacg |
| | | | gcaactttcacccttctccgctgatgggagggtttggaatgaagcacccg |
| | | | cctcctcagatcctcatcaaaaacacacctgtacctgcggatcctccaac |
| | | | ggccttcaacaaggacaagctgaactctttcatcacccagtattctactg |
| | | | gccaagtcagcgtggagatcgagtgggagctgcagaaggaaaacagcaag |
| | | | cgctggaacccggagatccagtacacttccaactattacaagtctaataa |
| | | | tgttgaatttgctgttaatactgaaggtgtatatagtgaaccccgcccca |
| | | | ttggcaccagatacctgactcgtaatctg |
| 138 | DNA | Adeno- | atggctgccgatggttatcttccagattggctcgaggacaaccttagtga |
| | | Associated | aggaattcgcgagtggtgggctttgaaacctggagcccctcaacccaagg |
| | | Virus 9 | caaatcaacaacatcaagacaacgctcgaggtcttgtgcttccgggttac |
| | | comprising | aaataccttggacccggcaacggactcgacaagggggagccggtcaacgc |
| | | SEQ | agcagacgcggcggccctcgagcacgacaaggcctacgaccagcagctca |
| | | ID NO: 12 | aggccggagacaacccgtacctcaagtacaaccacgccgacgccgagttc |
| | | | caggagcggctcaaagaagatacgtcttttgggggcaacctcgggcgagc |
| | | | agtcttccaggccaaaaagaggcttcttgaacctcttggtctggttgagg |
| | | | aagcggctaagacggctcctggaaagaagaggcctgtagagcagtctcct |
| | | | caggaaccggactcctccgcgggtattggcaaatcgggtgcacagcccgc |
| | | | taaaaagagactcaatttcggtcagactggcgacacagagtcagtcccag |
| | | | accctcaaccaatcggagaacctcccgcagccccctcaggtgtgggatct |
| | | | cttacaatggcttcaggtggtggcgcaccagtggcagacaataacgaagg |
| | | | tgccgatggagtgggtagttcctcgggaaattggcattgcgattcccaat |
| | | | ggctgggggacagagtcatcaccaccagcacccgaacctgggccctgccc |
| | | | acctacaacaatcacctctacaagcaaatctccaacagcacatctggagg |
| | | | atcttcaaatgacaacgcctacttcggctacagcaccccctgggggtatt |
| | | | ttgacttcaacagattccactgccacttctcaccacgtgactggcagcga |
| | | | ctcatcaacaacaactggggattccggcctaagcgactcaacttcaagct |
| | | | cttcaacattcaggtcaaagaggttacggacaacaatggagtcaagacca |
| | | | tcgccaataaccttaccagcacggtccaggtcttcacggactcagactat |
| | | | cagctcccgtacgtgctcgggtcggctcacgagggctgcctcccgccgtt |
| | | | cccagcggacgttttcatgattcctcagtacgggtatctgacgcttaatg |
| | | | atggaagccaggccgtgggtcgttcgtccttttactgcctggaatatttc |
| | | | ccgtcgcaaatgctaagaacgggtaacaacttccagttcagctacgagtt |
| | | | tgagaacgtacctttccatagcagctacgctcacagccaaagcctggacc |
| | | | gactaatgaatccactcatcgaccaatacttgtactatctctcTaGAact |
| | | | attAACGGTTCTGGACAGAATCAAcaaacgctaaaattcagtgtggccgg |
| | | | acccagcaacatggctgtccagggaagaaactacatacctggacccagct |
| | | | accgacaacaacgtgtctcaaccactgtgactcaaaacaacaacagcgaa |
| | | | tttgcttggcctggagcttcttcttgggctctcaatggacgtaatagctt |
| | | | gatgaatcctggacctgctatggccagccacaaagaaggagaggaccgtt |
| | | | tctttcctttgtctggatctttaatttttggcaaacaaggTacCggCaga |
| | | | gacaacgtggatgcggacaaagtcatgataaccaacgaagaagaaattaa |
| | | | aactactaacccggtagcaacggagtcctatggacaagtggccacaaacc |
| | | | accagagtGCCCAGCAAAATATTCCTAGTGAATATGCACAAGCACAGacc |
| | | | ggttgggttcaaaaccaaggaatacttccgggtatggtttggcaggacag |
| | | | agatgtgtacctgcaaggacccatttgggccaaaattcctcacacggacg |
| | | | gcaactttcacccttctccgctgatgggagggtttggaatgaagcacccg |
| | | | cctcctcagatcctcatcaaaaacacacctgtacctgcggatcctccaac |
| | | | ggccttcaacaaggacaagctgaactctttcatcacccagtattctactg |
| | | | gccaagtcagcgtggagatcgagtgggagctgcagaaggaaaacagcaag |
| | | | cgctggaacccggagatccagtacacttccaactattacaagtctaataa |
| | | | tgttgaatttgctgttaatactgaaggtgtatatagtgaaccccgcccca |
| | | | ttggcaccagatacctgactcgtaatctg |
| 139 | DNA | Adeno- | atggctgccgatggttatcttccagattggctcgaggacaaccttagtga |
| | | Associated | aggaattcgcgagtggtgggctttgaaacctggagcccctcaacccaagg |
| | | Virus 9 | caaatcaacaacatcaagacaacgctcgaggtcttgtgcttccgggttac |
| | | comprising | aaataccttggacccggcaacggactcgacaagggggagccggtcaacgc |
| | | SEQ | agcagacgcggcggccctcgagcacgacaaggcctacgaccagcagctca |
| | | ID NO: 12 | aggccggagacaacccgtacctcaagtacaaccacgccgacgccgagttc |
| | | | caggagcggctcaaagaagatacgtcttttgggggcaacctcgggcgagc |
| | | | agtcttccaggccaaaaagaggcttcttgaacctcttggtctggttgagg |
| | | | aagcggctaagacggctcctggaaagaagaggcctgtagagcagtctcct |
| | | | caggaaccggactcctccgcgggtattggcaaatcgggtgcacagcccgc |
| | | | taaaaagagactcaatttcggtcagactggcgacacagagtcagtcccag |
| | | | accctcaaccaatcggagaacctcccgcagccccctaggtgtgggatctc |
| | | | ttacaatggcttcaggtggtggcgcaccagtggcagacaataacgaaggt |
| | | | gccgatggagtgggtagttcctcgggaaattggcattgcgattcccaatg |
| | | | gctgggggacagagtcatcaccaccagcacccgaacctgggccctgccca |
| | | | cctacaacaatcacctctacaagcaaatctccaacagcacatctggagga |
| | | | tcttcaaatgacaacgcctacttcggctacagcaccccctgggggtattt |
| | | | tgacttcaacagattccactgccacttctcaccacgtgactggcagcgac |
| | | | tcatcaacaacaactggggattccggcctaagcgactcaacttcaagctc |
| | | | ttcaacattcaggtcaaagaggttacggacaacaatggagtcaagaccat |
| | | | cgccaataaccttaccagcacggtccaggtcttcacggactcagactatc |
| | | | agctcccgtacgtgctcgggtcggctcacgagggctgcctcccgccgttc |
| | | | ccagcggacgttttcatgattcctcagtacgggtatctgacgcttaatga |
| | | | tggaagccaggccgtgggtcgttcgtccttttactgcctggaatatttcc |
| | | | cgtcgcaaatgctaagaacgggtaacaacttccagttcagctacgagttt |
| | | | gagaacgtacctttccatagcagctacgctcacagccaaagcctggaccg |
| | | | actaatgaatccactcatcgaccaatacttgtactatctctcTaGAacta |
| | | | ttAACGGTTCTGGACAGAATCAAcaaacgctaaaattcagtgtggccgga |
| | | | cccagcaacatggctgtccagggaagaaactacatacctggacccagcta |
| | | | ccgacaacaacgtgtctcaaccactgtgactcaaaacaacaacagcgaat |
| | | | ttgcttggcctggagcttcttcttgggctctcaatggacgtaatagcttg |
| | | | atgaatcctggacctgctatggccagccacaaagaaggagaggaccgttt |
| | | | ctttcctttgtctggatctttaatttttggcaaacaaggTacCggCagag |
| | | | acaacgtggatgcggacaaagtcatgataaccaacgaagaagaaattaaa |
| | | | actactaacccggtagcaacggagtcctatggacaagtggccacaaacca |
| | | | ccagagtGCTCAACAGAACATACCGAGCGAGTACGCCCAGGCTCAAaccg |
| | | | gttgggttcaaaaccaaggaatacttccgggtatggtttggcaggacaga |
| | | | gatgtgtacctgcaaggacccatttgggccaaaattcctcacacggacgg |
| | | | caactttcacccttctccgctgatgggagggtttggaatgaagcacccgc |
| | | | ctcctcagatcctcatcaaaaacacacctgtacctgcggatcctccaacg |
| | | | gccttcaacaaggacaagctgaactctttcatcacccagtattctactgg |
| | | | ccaagtcagcgtggagatcgagtgggagctgcagaaggaaaacagcaagc |
| | | | gctggaacccggagatccagtacacttccaactattacaagtctaataat |
| | | | gttgaatttgctgttaatactgaaggtgtatatagtgaaccccgccccat |
| | | | tggcaccagatacctgactcgtaatctg |
| 140 | DNA | Adeno- | atggctgccgatggttatcttccagattggctcgaggacaaccttagtga |
| | | Associated | aggaattcgcgagtggtgggctttgaaacctggagcccctcaacccaagg |
| | | Virus 9 | caaatcaacaacatcaagacaacgctcgaggtcttgtgcttccgggttac |
| | | comprising | aaataccttggacccggcaacggactcgacaagggggagccggtcaacgc |
| | | SEQ | agcagacgcggcggccctcgagcacgacaaggcctacgaccagcagctca |
| | | ID NO: 12 | aggccggagacaacccgtacctcaagtacaaccacgccgacgccgagttc |
| | | | caggagcggctcaaagaagatacgtcttttgggggcaacctcgggcgagc |
| | | | agtcttccaggccaaaaagaggcttcttgaacctcttggtctggttgagg |
| | | | aagcggctaagacggctcctggaaagaagaggcctgtagagcagtctcct |
| | | | caggaaccggactcctccgcgggtattggcaaatcgggtgcacagcccgc |
| | | | taaaaagagactcaatttcggtcagactggcgacacagagtcagtcccag |
| | | | accctcaaccaatcggagaacctcccgcagccccctcaggtgtgggatct |
| | | | cttacaatggcttcaggtggtggcgcaccagtggcagacaataacgaagg |
| | | | tgccgatggagtgggtagttcctcgggaaattggcattgcgattcccaat |
| | | | ggctgggggacagagtcatcaccaccagcacccgaacctgggccctgccc |
| | | | acctacaacaatcacctctacaagcaaatctccaacagcacatctggagg |
| | | | atcttcaaatgacaacgcctacttcggctacagcaccccctgggggtatt |
| | | | ttgacttcaacagattccactgccacttctcaccacgtgactggcagcga |
| | | | ctcatcaacaacaactggggattccggcctaagcgactcaacttcaagct |
| | | | cttcaacattcaggtcaaagaggttacggacaacaatggagtcaagacca |
| | | | tcgccaataaccttaccagcacggtccaggtcttcacggactcagactat |
| | | | cagctcccgtacgtgctcgggtcggctcacgagggctgcctcccgccgtt |
| | | | cccagcggacgttttcatgattcctcagtacgggtatctgacgcttaatg |
| | | | atggaagccaggccgtgggtcgttcgtccttttactgcctggaatatttc |
| | | | ccgtcgcaaatgctaagaacgggtaacaacttccagttcagctacgagtt |
| | | | tgagaacgtacctttccatagcagctacgctcacagccaaagcctggacc |
| | | | gactaatgaatccactcatcgaccaatacttgtactatctctcTaGAact |
| | | | attAACGGTTCTGGACAGAATCAAcaaacgctaaaattcagtgtggccgg |
| | | | acccagcaacatggctgtccagggaagaaactacatacctggacccagct |
| | | | accgacaacaacgtgtctcaaccactgtgactcaaaacaacaacagcgaa |
| | | | tttgcttggcctggagcttcttcttgggctctcaatggacgtaatagctt |
| | | | gatgaatcctggacctgctatggccagccacaaagaaggagaggaccgtt |
| | | | tctttcctttgtctggatctttaatttttggcaaacaaggTacCggCaga |
| | | | gacaacgtggatgcggacaaagtcatgataaccaacgaagaagaaattaa |
| | | | aactactaacccggtagcaacggagtcctatggacaagtggccacaaacc |
| | | | accagagtGCCCAACAGAATATACCTAGCGAGTACGCTCAAGCTCAAacc |
| | | | ggttgggttcaaaaccaaggaatacttccgggtatggtttggcaggacag |
| | | | agatgtgtacctgcaaggacccatttgggccaaaattcctcacacggacg |
| | | | gcaactttcacccttctccgctgatgggagggtttggaatgaagcacccg |
| | | | cctcctcagatcctcatcaaaaacacacctgtacctgcggatcctccaac |
| | | | ggccttcaacaaggacaagctgaactctttcatcacccagtattctactg |
| | | | gccaagtcagcgtggagatcgagtgggagctgcagaaggaaaacagcaag |
| | | | cgctggaacccggagatccagtacacttccaactattacaagtctaataa |
| | | | tgttgaatttgctgttaatactgaaggtgtatatagtgaaccccgcccca |
| | | | ttggcaccagatacctgactcgtaatctg |
| 141 | DNA | Adeno- | atggctgccgatggttatcttccagattggctcgaggacaaccttagtga |
| | | Associated | aggaattcgcgagtggtgggctttgaaacctggagcccctcaacccaagg |
| | | Virus 9 | caaatcaacaacatcaagacaacgctcgaggtcttgtgcttccgggttac |
| | | comprising | aaataccttggacccggcaacggactcgacaagggggagccggtcaacgc |
| | | SEQ | agcagacgcggcggccctcgagcacgacaaggcctacgaccagcagctca |
| | | ID NO: 13 | aggccggagacaacccgtacctcaagtacaaccacgccgacgccgagttc |
| | | | caggagcggctcaaagaagatacgtcttttgggggcaacctcgggcgagc |
| | | | agtcttccaggccaaaaagaggcttcttgaacctcttggtctggttgagg |
| | | | aagcggctaagacggctcctggaaagaagaggcctgtagagcagtctcct |
| | | | caggaaccggactcctccgcgggtattggcaaatcgggtgcacagcccgc |
| | | | taaaaagagactcaatttcggtcagactggcgacacagagtcagtcccag |
| | | | accctcaaccaatcggagaacctcccgcagccccctcaggtgtgggatct |
| | | | cttacaatggcttcaggtggtggcgcaccagtggcagacaataacgaagg |
| | | | tgccgatggagtgggtagttcctcgggaaattggcattgcgattcccaat |
| | | | ggctgggggacagagtcatcaccaccagcacccgaacctgggccctgccc |
| | | | acctacaacaatcacctctacaagcaaatctccaacagcacatctggagg |
| | | | atcttcaaatgacaacgcctacttcggctacagcaccccctgggggtatt |
| | | | ttgacttcaacagattccactgccacttctcaccacgtgactggcagcga |
| | | | ctcatcaacaacaactggggattccggcctaagcgactcaacttcaagct |
| | | | cttcaacattcaggtcaaagaggttacggacaacaatggagtcaagacca |
| | | | tcgccaataaccttaccagcacggtccaggtcttcacggactcagactat |
| | | | cagctcccgtacgtgctcgggtcggctcacgagggctgcctcccgccgtt |
| | | | cccagcggacgttttcatgattcctcagtacgggtatctgacgcttaatg |
| | | | atggaagccaggccgtgggtcgttcgtccttttactgcctggaatatttc |
| | | | ccgtcgcaaatgctaagaacgggtaacaacttccagttcagctacgagtt |
| | | | tgagaacgtacctttccatagcagctacgctcacagccaaagcctggacc |
| | | | gactaatgaatccactcatcgaccaatacttgtactatctctcTaGAact |
| | | | attAACGGTTCTGGACAGAATCAAcaaacgctaaaattcagtgtggccgg |
| | | | acccagcaacatggctgtccagggaagaaactacatacctggacccagct |
| | | | accgacaacaacgtgtctcaaccactgtgactcaaaacaacaacagcgaa |
| | | | tttgcttggcctggagcttcttcttgggctctcaatggacgtaatagctt |
| | | | gatgaatcctggacctgctatggccagccacaaagaaggagaggaccgtt |
| | | | tctttcctttgtctggatctttaatttttggcaaacaaggTacCggCaga |
| | | | gacaacgtggatgcggacaaagtcatgataaccaacgaagaagaaattaa |
| | | | aactactaacccggtagcaacggagtcctatggacaagtggccacaaacc |
| | | | accagagtGCTCAACAACGTATACCTCAAGAGTATGCTCAAGCGCAAacc |
| | | | ggttgggttcaaaaccaaggaatacttccgggtatggtttggcaggacag |
| | | | agatgtgtacctgcaaggacccatttgggccaaaattcctcacacggacg |
| | | | gcaactttcacccttctccgctgatgggagggtttggaatgaagcacccg |
| | | | cctcctcagatcctcatcaaaaacacacctgtacctgcggatcctccaac |
| | | | ggccttcaacaaggacaagctgaactctttcatcacccagtattctactg |
| | | | gccaagtcagcgtggagatcgagtgggagctgcagaaggaaaacagcaag |
| | | | cgctggaacccggagatccagtacacttccaactattacaagtctaataa |
| | | | tgttgaatttgctgttaatactgaaggtgtatatagtgaaccccgcccca |
| | | | ttggcaccagatacctgactcgtaatctg |
| 142 | DNA | Adeno- | atggctgccgatggttatcttccagattggctcgaggacaaccttagtga |
| | | Associated | aggaattcgcgagtggtgggctttgaaacctggagcccctcaacccaagg |
| | | Virus 9 | caaatcaacaacatcaagacaacgctcgaggtcttgtgcttccgggttac |
| | | comprising | aaataccttggacccggcaacggactcgacaagggggagccggtcaacgc |
| | | SEQ | agcagacgcggcggccctcgagcacgacaaggcctacgaccagcagctca |
| | | ID NO: 13 | aggccggagacaacccgtacctcaagtacaaccacgccgacgccgagttc |
| | | | caggagcggctcaaagaagatacgtcttttgggggcaacctcgggcgagc |
| | | | agtcttccaggccaaaaagaggcttcttgaacctcttggtctggttgagg |
| | | | aagcggctaagacggctcctggaaagaagaggcctgtagagcagtctcct |
| | | | caggaaccggactcctccgcgggtattggcaaatcgggtgcacagcccgc |
| | | | taaaaagagactcaatttcggtcagactggcgacacagagtcagtcccag |
| | | | accctcaaccaatcggagaacctcccgcagccccctcaggtgtgggatct |
| | | | cttacaatggcttcaggtggtggcgcaccagtggcagacaataacgaagg |
| | | | tgccgatggagtgggtagttcctcgggaaattggcattgcgattcccaat |
| | | | ggctgggggacagagtcatcaccaccagcacccgaacctgggccctgccc |
| | | | acctacaacaatcacctctacaagcaaatctccaacagcacatctggagg |
| | | | atcttcaaatgacaacgcctacttcggctacagcaccccctgggggtatt |
| | | | ttgacttcaacagattccactgccacttctcaccacgtgactggcagcga |
| | | | ctcatcaacaacaactggggattccggcctaagcgactcaacttcaagct |
| | | | cttcaacattcaggtcaaagaggttacggacaacaatggagtcaagacca |
| | | | tcgccaataaccttaccagcacggtccaggtcttcacggactcagactat |
| | | | cagctcccgtacgtgctcgggtcggctcacgagggctgcctcccgccgtt |
| | | | cccagcggacgttttcatgattcctcagtacgggtatctgacgcttaatg |
| | | | atggaagccaggccgtgggtcgttcgtccttttactgcctggaatatttc |
| | | | ccgtcgcaaatgctaagaacgggtaacaacttccagttcagctacgagtt |
| | | | tgagaacgtacctttccatagcagctacgctcacagccaaagcctggacc |
| | | | gactaatgaatccactcatcgaccaatacttgtactatctctcTaGAact |
| | | | attAACGGTTCTGGACAGAATCAAcaaacgctaaaattcagtgtggccgg |
| | | | acccagcaacatggctgtccagggaagaaactacatacctggacccagct |
| | | | accgacaacaacgtgtctcaaccactgtgactcaaaacaacaacagcgaa |
| | | | tttgcttggcctggagcttcttcttgggctctcaatggacgtaatagctt |
| | | | gatgaatcctggacctgctatggccagccacaaagaaggagaggaccgtt |
| | | | tctttcctttgtctggatctttaatttttggcaaacaaggTacCggCaga |
| | | | gacaacgtggatgcggacaaagtcatgataaccaacgaagaagaaattaa |
| | | | aactactaacccggtagcaacggagtcctatggacaagtggccacaaacc |
| | | | accagagtGCACAGCAGCGAATTCCTCAGGAATACGCCCAGGCACAGacc |
| | | | ggttgggttcaaaaccaaggaatacttccgggtatggtttggcaggacag |
| | | | agatgtgtacctgcaaggacccatttgggccaaaattcctcacacggacg |
| | | | gcaactttcacccttctccgctgatgggagggtttggaatgaagcacccg |
| | | | cctcctcagatcctcatcaaaaacacacctgtacctgcggatcctccaac |
| | | | ggccttcaacaaggacaagctgaactctttcatcacccagtattctactg |
| | | | gccaagtcagcgtggagatcgagtgggagctgcagaaggaaaacagcaag |
| | | | cgctggaacccggagatccagtacacttccaactattacaagtctaataa |
| | | | tgttgaatttgctgttaatactgaaggtgtatatagtgaaccccgcccca |
| | | | ttggcaccagatacctgactcgtaatctg |
| 143 | DNA | Adeno- | atggctgccgatggttatcttccagattggctcgaggacaaccttagtga |
| | | Associated | aggaattcgcgagtggtgggctttgaaacctggagcccctcaacccaagg |
| | | Virus 9 | caaatcaacaacatcaagacaacgctcgaggtcttgtgcttccgggttac |
| | | comprising | aaataccttggacccggcaacggactcgacaagggggagccggtcaacgc |
| | | SEQ | agcagacgcggcggccctcgagcacgacaaggcctacgaccagcagctca |
| | | ID NO: 13 | aggccggagacaacccgtacctcaagtacaaccacgccgacgccgagttc |
| | | | caggagcggctcaaagaagatacgtcttttgggggcaacctcgggcgagc |
| | | | agtcttccaggccaaaaagaggcttcttgaacctcttggtctggttgagg |
| | | | aagcggctaagacggctcctggaaagaagaggcctgtagagcagtctcct |
| | | | caggaaccggactcctccgcgggtattggcaaatcgggtgcacagcccgc |
| | | | taaaaagagactcaatttcggtcagactggcgacacagagtcagtcccag |
| | | | accctcaaccaatcggagaacctcccgcagccccctcaggtgtgggatct |
| | | | cttacaatggcttcaggtggtggcgcaccagtggcagacaataacgaagg |
| | | | tgccgatggagtgggtagttcctcgggaaattggcattgcgattcccaat |
| | | | ggctgggggacagagtcatcaccaccagcacccgaacctgggccctgccc |
| | | | acctacaacaatcacctctacaagcaaatctccaacagcacatctggagg |
| | | | atcttcaaatgacaacgcctacttcggctacagcaccccctgggggtatt |
| | | | ttgacttcaacagattccactgccacttctcaccacgtgactggcagcga |
| | | | ctcatcaacaacaactggggattccggcctaagcgactcaacttcaagct |
| | | | cttcaacattcaggtcaaagaggttacggacaacaatggagtcaagacca |
| | | | tcgccaataaccttaccagcacggtccaggtcttcacggactcagactat |
| | | | cagctcccgtacgtgctcgggtcggctcacgagggctgcctcccgccgtt |
| | | | cccagcggacgttttcatgattcctcagtacgggtatctgacgcttaatg |
| | | | atggaagccaggccgtgggtcgttcgtccttttactgcctggaatatttc |
| | | | ccgtcgcaaatgctaagaacgggtaacaacttccagttcagctacgagtt |
| | | | tgagaacgtacctttccatagcagctacgctcacagccaaagcctggacc |
| | | | gactaatgaatccactcatcgaccaatacttgtactatctctcTaGAact |
| | | | attAACGGTTCTGGACAGAATCAAcaaacgctaaaattcagtgtggccgg |
| | | | acccagcaacatggctgtccagggaagaaactacatacctggacccagct |
| | | | accgacaacaacgtgtctcaaccactgtgactcaaaacaacaacagcgaa |
| | | | tttgcttggcctggagcttcttcttgggctctcaatggacgtaatagctt |
| | | | gatgaatcctggacctgctatggccagccacaaagaaggagaggaccgtt |
| | | | tctttcctttgtctggatctttaatttttggcaaacaaggTacCggCaga |
| | | | gacaacgtggatgcggacaaagtcatgataaccaacgaagaagaaattaa |
| | | | aactactaacccggtagcaacggagtcctatggacaagtggccacaaacc |
| | | | accagagtGCGCAACAGCGGATACCACAGGAGTACGCTCAGGCACAGacc |
| | | | ggttgggttcaaaaccaaggaatacttccgggtatggtttggcaggacag |
| | | | agatgtgtacctgcaaggacccatttgggccaaaattcctcacacggacg |
| | | | gcaactttcacccttctccgctgatgggagggtttggaatgaagcacccg |
| | | | cctcctcagatcctcatcaaaaacacacctgtacctgcggatcctccaac |
| | | | ggccttcaacaaggacaagctgaactctttcatcacccagtattctactg |
| | | | gccaagtcagcgtggagatcgagtgggagctgcagaaggaaaacagcaag |
| | | | cgctggaacccggagatccagtacacttccaactattacaagtctaataa |
| | | | tgttgaatttgctgttaatactgaaggtgtatatagtgaaccccgcccca |
| | | | ttggcaccagatacctgactcgtaatctg |
| 144 | DNA | Adeno- | atggctgccgatggttatcttccagattggctcgaggacaaccttagtga |
| | | Associated | aggaattcgcgagtggtgggctttgaaacctggagcccctcaacccaagg |
| | | Virus 9 | caaatcaacaacatcaagacaacgctcgaggtcttgtgcttccgggttac |
| | | comprising | aaataccttggacccggcaacggactcgacaagggggagccggtcaacgc |
| | | SEQ | agcagacgcggcggccctcgagcacgacaaggcctacgaccagcagctca |
| | | ID NO: 13 | aggccggagacaacccgtacctcaagtacaaccacgccgacgccgagttc |
| | | | caggagcggctcaaagaagatacgtcttttgggggcaacctcgggcgagc |
| | | | agtcttccaggccaaaaagaggcttcttgaacctcttggtctggttgagg |
| | | | aagcggctaagacggctcctggaaagaagaggcctgtagagcagtctcct |
| | | | caggaaccggactcctccgcgggtattggcaaatcgggtgcacagcccgc |
| | | | taaaaagagactcaatttcggtcagactggcgacacagagtcagtcccag |
| | | | accctcaaccaatcggagaacctcccgcagccccctcaggtgtgggatct |
| | | | cttacaatggcttcaggtggtggcgcaccagtggcagacaataacgaagg |
| | | | tgccgatggagtgggtagttcctcgggaaattggcattgcgattcccaat |
| | | | ggctgggggacagagtcatcaccaccagcacccgaacctgggccctgccc |
| | | | acctacaacaatcacctctacaagcaaatctccaacagcacatctggagg |
| | | | atcttcaaatgacaacgcctacttcggctacagcaccccctgggggtatt |
| | | | ttgacttcaacagattccactgccacttctcaccacgtgactggcagcga |
| | | | ctcatcaacaacaactggggattccggcctaagcgactcaacttcaagct |
| | | | cttcaacattcaggtcaaagaggttacggacaacaatggagtcaagacca |
| | | | tcgccaataaccttaccagcacggtccaggtcttcacggactcagactat |
| | | | cagctcccgtacgtgctcgggtcggctcacgagggctgcctcccgccgtt |
| | | | cccagcggacgttttcatgattcctcagtacgggtatctgacgcttaatg |
| | | | atggaagccaggccgtgggtcgttcgtccttttactgcctggaatatttc |
| | | | ccgtcgcaaatgctaagaacgggtaacaacttccagttcagctacgagtt |
| | | | tgagaacgtacctttccatagcagctacgctcacagccaaagcctggacc |
| | | | gactaatgaatccactcatcgaccaatacttgtactatctctcTaGAact |
| | | | attAACGGTTCTGGACAGAATCAAcaaacgctaaaattcagtgtggccgg |
| | | | acccagcaacatggctgtccagggaagaaactacatacctggacccagct |
| | | | accgacaacaacgtgtctcaaccactgtgactcaaaacaacaacagcgaa |
| | | | tttgcttggcctggagcttcttcttgggctctcaatggacgtaatagctt |
| | | | gatgaatcctggacctgctatggccagccacaaagaaggagaggaccgtt |
| | | | tctttcctttgtctggatctttaatttttggcaaacaaggTacCggCaga |
| | | | gacaacgtggatgcggacaaagtcatgataaccaacgaagaagaaattaa |
| | | | aactactaacccggtagcaacggagtcctatggacaagtggccacaaacc |
| | | | accagagtGCCCAACAAAGAATCCCCCAAGAGTATGCTCAAGCCCAAacc |
| | | | ggttgggttcaaaaccaaggaatacttccgggtatggtttggcaggacag |
| | | | agatgtgtacctgcaaggacccatttgggccaaaattcctcacacggacg |
| | | | gcaactttcacccttctccgctgatgggagggtttggaatgaagcacccg |
| | | | cctcctcagatcctcatcaaaaacacacctgtacctgcggatcctccaac |
| | | | ggccttcaacaaggacaagctgaactctttcatcacccagtattctactg |
| | | | gccaagtcagcgtggagatcgagtgggagctgcagaaggaaaacagcaag |
| | | | cgctggaacccggagatccagtacacttccaactattacaagtctaataa |
| | | | tgttgaatttgctgttaatactgaaggtgtatatagtgaaccccgcccca |
| | | | ttggcaccagatacctgactcgtaatctg |
| 145 | DNA | Adeno- | atggctgccgatggttatcttccagattggctcgaggacaaccttagtga |
| | | Associated | aggaattcgcgagtggtgggctttgaaacctggagcccctcaacccaagg |
| | | Virus 9 | caaatcaacaacatcaagacaacgctcgaggtcttgtgcttccgggttac |
| | | comprising | aaataccttggacccggcaacggactcgacaagggggagccggtcaacgc |
| | | SEQ | agcagacgcggcggccctcgagcacgacaaggcctacgaccagcagctca |
| | | ID NO: 13 | aggccggagacaacccgtacctcaagtacaaccacgccgacgccgagttc |
| | | | caggagcggctcaaagaagatacgtcttttgggggcaacctcgggcgagc |
| | | | agtcttccaggccaaaaagaggcttcttgaacctcttggtctggttgagg |
| | | | aagcggctaagacggctcctggaaagaagaggcctgtagagcagtctcct |
| | | | caggaaccggactcctccgcgggtattggcaaatcgggtgcacagcccgc |
| | | | taaaaagagactcaatttcggtcagactggcgacacagagtcagtcccag |
| | | | accctcaaccaatcggagaacctcccgcagccccctcaggtgtgggatct |
| | | | cttacaatggcttcaggtggtggcgcaccagtggcagacaataacgaagg |
| | | | tgccgatggagtgggtagttcctcgggaaattggcattgcgattcccaat |
| | | | ggctgggggacagagtcatcaccaccagcacccgaacctgggccctgccc |
| | | | acctacaacaatcacctctacaagcaaatctccaacagcacatctggagg |
| | | | atcttcaaatgacaacgcctacttcggctacagcaccccctgggggtatt |
| | | | ttgacttcaacagattccactgccacttctcaccacgtgactggcagcga |
| | | | ctcatcaacaacaactggggattccggcctaagcgactcaacttcaagct |
| | | | cttcaacattcaggtcaaagaggttacggacaacaatggagtcaagacca |
| | | | tcgccaataaccttaccagcacggtccaggtcttcacggactcagactat |
| | | | cagctcccgtacgtgctcgggtcggctcacgagggctgcctcccgccgtt |
| | | | cccagcggacgttttcatgattcctcagtacgggtatctgacgcttaatg |
| | | | atggaagccaggccgtgggtcgttcgtccttttactgcctggaatatttc |
| | | | ccgtcgcaaatgctaagaacgggtaacaacttccagttcagctacgagtt |
| | | | tgagaacgtacctttccatagcagctacgctcacagccaaagcctggacc |
| | | | gactaatgaatccactcatcgaccaatacttgtactatctctcTaGAact |
| | | | attAACGGTTCTGGACAGAATCAAcaaacgctaaaattcagtgtggccgg |
| | | | acccagcaacatggctgtccagggaagaaactacatacctggacccagct |
| | | | accgacaacaacgtgtctcaaccactgtgactcaaaacaacaacagcgaa |
| | | | tttgcttggcctggagcttcttcttgggctctcaatggacgtaatagctt |
| | | | gatgaatcctggacctgctatggccagccacaaagaaggagaggaccgtt |
| | | | tctttcctttgtctggatctttaatttttggcaaacaaggTacCggCaga |
| | | | gacaacgtggatgcggacaaagtcatgataaccaacgaagaagaaattaa |
| | | | aactactaacccggtagcaacggagtcctatggacaagtggccacaaacc |
| | | | accagagtGCCCAGCAGCGTATTCCGCAAGAGTATGCACAGGCCCAAacc |
| | | | ggttgggttcaaaaccaaggaatacttccgggtatggtttggcaggacag |
| | | | agatgtgtacctgcaaggacccatttgggccaaaattcctcacacggacg |
| | | | gcaactttcacccttctccgctgatgggagggtttggaatgaagcacccg |
| | | | cctcctcagatcctcatcaaaaacacacctgtacctgcggatcctccaac |
| | | | ggccttcaacaaggacaagctgaactctttcatcacccagtattctactg |
| | | | gccaagtcagcgtggagatcgagtgggagctgcagaaggaaaacagcaag |
| | | | cgctggaacccggagatccagtacacttccaactattacaagtctaataa |
| | | | tgttgaatttgctgttaatactgaaggtgtatatagtgaaccccgcccca |
| | | | ttggcaccagatacctgactcgtaatctg |
| 146 | DNA | Adeno- | atggctgccgatggttatcttccagattggctcgaggacaaccttagtga |
| | | Associated | aggaattcgcgagtggtgggctttgaaacctggagcccctcaacccaagg |
| | | Virus 9 | caaatcaacaacatcaagacaacgctcgaggtcttgtgcttccgggttac |
| | | comprising | aaataccttggacccggcaacggactcgacaagggggagccggtcaacgc |
| | | SEQ | agcagacgcggcggccctcgagcacgacaaggcctacgaccagcagctca |
| | | ID NO: 13 | aggccggagacaacccgtacctcaagtacaaccacgccgacgccgagttc |
| | | | caggagcggctcaaagaagatacgtcttttgggggcaacctcgggcgagc |
| | | | agtcttccaggccaaaaagaggcttcttgaacctcttggtctggttgagg |
| | | | aagcggctaagacggctcctggaaagaagaggcctgtagagcagtctcct |
| | | | caggaaccggactcctccgcgggtattggcaaatcgggtgcacagcccgc |
| | | | taaaaagagactcaatttcggtcagactggcgacacagagtcagtcccag |
| | | | accctcaaccaatcggagaacctcccgcagccccctcaggtgtgggatct |
| | | | cttacaatggcttcaggtggtggcgcaccagtggcagacaataacgaagg |
| | | | tgccgatggagtgggtagttcctcgggaaattggcattgcgattcccaat |
| | | | ggctgggggacagagtcatcaccaccagcacccgaacctgggccctgccc |
| | | | acctacaacaatcacctctacaagcaaatctccaacagcacatctggagg |
| | | | atcttcaaatgacaacgcctacttcggctacagcaccccctgggggtatt |
| | | | ttgacttcaacagattccactgccacttctcaccacgtgactggcagcga |
| | | | ctcatcaacaacaactggggattccggcctaagcgactcaacttcaagct |
| | | | cttcaacattcaggtcaaagaggttacggacaacaatggagtcaagacca |
| | | | tcgccaataaccttaccagcacggtccaggtcttcacggactcagactat |
| | | | cagctcccgtacgtgctcgggtcggctcacgagggctgcctcccgccgtt |
| | | | cccagcggacgttttcatgattcctcagtacgggtatctgacgcttaatg |
| | | | atggaagccaggccgtgggtcgttcgtccttttactgcctggaatatttc |
| | | | ccgtcgcaaatgctaagaacgggtaacaacttccagttcagctacgagtt |
| | | | tgagaacgtacctttccatagcagctacgctcacagccaaagcctggacc |
| | | | gactaatgaatccactcatcgaccaatacttgtactatctctcTaGAact |
| | | | attAACGGTTCTGGACAGAATCAAcaaacgctaaaattcagtgtggccgg |
| | | | acccagcaacatggctgtccagggaagaaactacatacctggacccagct |
| | | | accgacaacaacgtgtctcaaccactgtgactcaaaacaacaacagcgaa |
| | | | tttgcttggcctggagcttcttcttgggctctcaatggacgtaatagctt |
| | | | gatgaatcctggacctgctatggccagccacaaagaaggagaggaccgtt |
| | | | tctttcctttgtctggatctttaatttttggcaaacaaggTacCggCaga |
| | | | gacaacgtggatgcggacaaagtcatgataaccaacgaagaagaaattaa |
| | | | aactactaacccggtagcaacggagtcctatggacaagtggccacaaacc |
| | | | accagagtGCACAGCAGAGGATTCCCCAGGAATACGCCCAGGCACAGacc |
| | | | ggttgggttcaaaaccaaggaatacttccgggtatggtttggcaggacag |
| | | | agatgtgtacctgcaaggacccatttgggccaaaattcctcacacggacg |
| | | | gcaactttcacccttctccgctgatgggagggtttggaatgaagcacccg |
| | | | cctcctcagatcctcatcaaaaacacacctgtacctgcggatcctccaac |
| | | | ggccttcaacaaggacaagctgaactctttcatcacccagtattctactg |
| | | | gccaagtcagcgtggagatcgagtgggagctgcagaaggaaaacagcaag |
| | | | cgctggaacccggagatccagtacacttccaactattacaagtctaataa |
| | | | tgttgaatttgctgttaatactgaaggtgtatatagtgaaccccgcccca |
| | | | ttggcaccagatacctgactcgtaatctg |
| 147 | DNA | Adeno- | atggctgccgatggttatcttccagattggctcgaggacaaccttagtga |
| | | Associated | aggaattcgcgagtggtgggctttgaaacctggagcccctcaacccaagg |
| | | Virus 9 | caaatcaacaacatcaagacaacgctcgaggtcttgtgcttccgggttac |
| | | comprising | aaataccttggacccggcaacggactcgacaagggggagccggtcaacgc |
| | | SEQ | agcagacgcggcggccctcgagcacgacaaggcctacgaccagcagctca |
| | | ID NO: 13 | aggccggagacaacccgtacctcaagtacaaccacgccgacgccgagttc |
| | | | caggagcggctcaaagaagatacgtcttttgggggcaacctcgggcgagc |
| | | | agtcttccaggccaaaaagaggcttcttgaacctcttggtctggttgagg |
| | | | aagcggctaagacggctcctggaaagaagaggcctgtagagcagtctcct |
| | | | caggaaccggactcctccgcgggtattggcaaatcgggtgcacagcccgc |
| | | | taaaaagagactcaatttcggtcagactggcgacacagagtcagtcccag |
| | | | accctcaaccaatcggagaacctcccgcagccccctcaggtgtgggatct |
| | | | cttacaatggcttcaggtggtggcgcaccagtggcagacaataacgaagg |
| | | | tgccgatggagtgggtagttcctcgggaaattggcattgcgattcccaat |
| | | | ggctgggggacagagtcatcaccaccagcacccgaacctgggccctgccc |
| | | | acctacaacaatcacctctacaagcaaatctccaacagcacatctggagg |
| | | | atcttcaaatgacaacgcctacttcggctacagcaccccctgggggtatt |
| | | | ttgacttcaacagattccactgccacttctcaccacgtgactggcagcga |
| | | | ctcatcaacaacaactggggattccggcctaagcgactcaacttcaagct |
| | | | cttcaacattcaggtcaaagaggttacggacaacaatggagtcaagacca |
| | | | tcgccaataaccttaccagcacggtccaggtcttcacggactcagactat |
| | | | cagctcccgtacgtgctcgggtcggctcacgagggctgcctcccgccgtt |
| | | | cccagcggacgttttcatgattcctcagtacgggtatctgacgcttaatg |
| | | | atggaagccaggccgtgggtcgttcgtccttttactgcctggaatatttc |
| | | | ccgtcgcaaatgctaagaacgggtaacaacttccagttcagctacgagtt |
| | | | tgagaacgtacctttccatagcagctacgctcacagccaaagcctggacc |
| | | | gactaatgaatccactcatcgaccaatacttgtactatctctcTaGAact |
| | | | attAACGGTTCTGGACAGAATCAAcaaacgctaaaattcagtgtggccgg |
| | | | acccagcaacatggctgtccagggaagaaactacatacctggacccagct |
| | | | accgacaacaacgtgtctcaaccactgtgactcaaaacaacaacagcgaa |
| | | | tttgcttggcctggagcttcttcttgggctctcaatggacgtaatagctt |
| | | | gatgaatcctggacctgctatggccagccacaaagaaggagaggaccgtt |
| | | | tctttcctttgtctggatctttaatttttggcaaacaaggTacCggCaga |
| | | | gacaacgtggatgcggacaaagtcatgataaccaacgaagaagaaattaa |
| | | | aactactaacccggtagcaacggagtcctatggacaagtggccacaaacc |
| | | | accagagtGCGCAACAGAGAATCCCACAGGAGTATGCCCAAGCACAAacc |
| | | | ggttgggttcaaaaccaaggaatacttccgggtatggtttggcaggacag |
| | | | agatgtgtacctgcaaggacccatttgggccaaaattcctcacacggacg |
| | | | gcaactttcacccttctccgctgatgggagggtttggaatgaagcacccg |
| | | | cctcctcagatcctcatcaaaaacacacctgtacctgcggatcctccaac |
| | | | ggccttcaacaaggacaagctgaactctttcatcacccagtattctactg |
| | | | gccaagtcagcgtggagatcgagtgggagctgcagaaggaaaacagcaag |
| | | | cgctggaacccggagatccagtacacttccaactattacaagtctaataa |
| | | | tgttgaatttgctgttaatactgaaggtgtatatagtgaaccccgcccca |
| | | | ttggcaccagatacctgactcgtaatctg |
| 148 | DNA | Adeno- | atggctgccgatggttatcttccagattggctcgaggacaaccttagtga |
| | | Associated | aggaattcgcgagtggtgggctttgaaacctggagcccctcaacccaagg |
| | | Virus 9 | caaatcaacaacatcaagacaacgctcgaggtcttgtgcttccgggttac |
| | | comprising | aaataccttggacccggcaacggactcgacaagggggagccggtcaacgc |
| | | SEQ | agcagacgcggcggccctcgagcacgacaaggcctacgaccagcagctca |
| | | ID NO: 13 | aggccggagacaacccgtacctcaagtacaaccacgccgacgccgagttc |
| | | | caggagcggctcaaagaagatacgtcttttgggggcaacctcgggcgagc |
| | | | agtcttccaggccaaaaagaggcttcttgaacctcttggtctggttgagg |
| | | | aagcggctaagacggctcctggaaagaagaggcctgtagagcagtctcct |
| | | | caggaaccggactcctccgcgggtattggcaaatcgggtgcacagcccgc |
| | | | taaaaagagactcaatttcggtcagactggcgacacagagtcagtcccag |
| | | | accctcaaccaatcggagaacctcccgcagccccctcaggtgtgggatct |
| | | | cttacaatggcttcaggtggtggcgcaccagtggcagacaataacgaagg |
| | | | tgccgatggagtgggtagttcctcgggaaattggcattgcgattcccaat |
| | | | ggctgggggacagagtcatcaccaccagcacccgaacctgggccctgccc |
| | | | acctacaacaatcacctctacaagcaaatctccaacagcacatctggagg |
| | | | atcttcaaatgacaacgcctacttcggctacagcaccccctgggggtatt |
| | | | ttgacttcaacagattccactgccacttctcaccacgtgactggcagcga |
| | | | ctcatcaacaacaactggggattccggcctaagcgactcaacttcaagct |
| | | | cttcaacattcaggtcaaagaggttacggacaacaatggagtcaagacca |
| | | | tcgccaataaccttaccagcacggtccaggtcttcacggactcagactat |
| | | | cagctcccgtacgtgctcgggtcggctcacgagggctgcctcccgccgtt |
| | | | cccagcggacgttttcatgattcctcagtacgggtatctgacgcttaatg |
| | | | atggaagccaggccgtgggtcgttcgtccttttactgcctggaatatttc |
| | | | ccgtcgcaaatgctaagaacgggtaacaacttccagttcagctacgagtt |
| | | | tgagaacgtacctttccatagcagctacgctcacagccaaagcctggacc |
| | | | gactaatgaatccactcatcgaccaatacttgtactatctctcTaGAact |
| | | | attAACGGTTCTGGACAGAATCAAcaaacgctaaaattcagtgtggccgg |
| | | | acccagcaacatggctgtccagggaagaaactacatacctggacccagct |
| | | | accgacaacaacgtgtctcaaccactgtgactcaaaacaacaacagcgaa |
| | | | tttgcttggcctggagcttcttcttgggctctcaatggacgtaatagctt |
| | | | gatgaatcctggacctgctatggccagccacaaagaaggagaggaccgtt |
| | | | tctttcctttgtctggatctttaatttttggcaaacaaggTacCggCaga |
| | | | gacaacgtggatgcggacaaagtcatgataaccaacgaagaagaaattaa |
| | | | aactactaacccggtagcaacggagtcctatggacaagtggccacaaacc |
| | | | accagagtGCTCAACAACGAATACCACAGGAATACGCGCAAGCTCAGacc |
| | | | ggttgggttcaaaaccaaggaatacttccgggtatggtttggcaggacag |
| | | | agatgtgtacctgcaaggacccatttgggccaaaattcctcacacggacg |
| | | | gcaactttcacccttctccgctgatgggagggtttggaatgaagcacccg |
| | | | cctcctcagatcctcatcaaaaacacacctgtacctgcggatcctccaac |
| | | | ggccttcaacaaggacaagctgaactctttcatcacccagtattctactg |
| | | | gccaagtcagcgtggagatcgagtgggagctgcagaaggaaaacagcaag |
| | | | cgctggaacccggagatccagtacacttccaactattacaagtctaataa |
| | | | tgttgaatttgctgttaatactgaaggtgtatatagtgaaccccgcccca |
| | | | ttggcaccagatacctgactcgtaatctg |
| 149 | DNA | Adeno- | atggctgccgatggttatcttccagattggctcgaggacaaccttagtga |
| | | Associated | aggaattcgcgagtggtgggctttgaaacctggagcccctcaacccaagg |
| | | Virus 9 | caaatcaacaacatcaagacaacgctcgaggtcttgtgcttccgggttac |
| | | comprising | aaataccttggacccggcaacggactcgacaagggggagccggtcaacgc |
| | | SEQ | agcagacgcggcggccctcgagcacgacaaggcctacgaccagcagctca |
| | | ID NO: 13 | aggccggagacaacccgtacctcaagtacaaccacgccgacgccgagttc |
| | | | caggagcggctcaaagaagatacgtcttttgggggcaacctcgggcgagc |
| | | | agtcttccaggccaaaaagaggcttcttgaacctcttggtctggttgagg |
| | | | aagcggctaagacggctcctggaaagaagaggcctgtagagcagtctcct |
| | | | caggaaccggactcctccgcgggtattggcaaatcgggtgcacagcccgc |
| | | | taaaaagagactcaatttcggtcagactggcgacacagagtcagtcccag |
| | | | accctcaaccaatcggagaacctcccgcagccccctcaggtgtgggatct |
| | | | cttacaatggcttcaggtggtggcgcaccagtggcagacaataacgaagg |
| | | | tgccgatggagtgggtagttcctcgggaaattggcattgcgattcccaat |
| | | | ggctgggggacagagtcatcaccaccagcacccgaacctgggccctgccc |
| | | | acctacaacaatcacctctacaagcaaatctccaacagcacatctggagg |
| | | | atcttcaaatgacaacgcctacttcggctacagcaccccctgggggtatt |
| | | | ttgacttcaacagattccactgccacttctcaccacgtgactggcagcga |
| | | | ctcatcaacaacaactggggattccggcctaagcgactcaacttcaagct |
| | | | cttcaacattcaggtcaaagaggttacggacaacaatggagtcaagacca |
| | | | tcgccaataaccttaccagcacggtccaggtcttcacggactcagactat |
| | | | cagctcccgtacgtgctcgggtcggctcacgagggctgcctcccgccgtt |
| | | | cccagcggacgttttcatgattcctcagtacgggtatctgacgcttaatg |
| | | | atggaagccaggccgtgggtcgttcgtccttttactgcctggaatatttc |
| | | | ccgtcgcaaatgctaagaacgggtaacaacttccagttcagctacgagtt |
| | | | tgagaacgtacctttccatagcagctacgctcacagccaaagcctggacc |
| | | | gactaatgaatccactcatcgaccaatacttgtactatctctcTaGAact |
| | | | attAACGGTTCTGGACAGAATCAAcaaacgctaaaattcagtgtggccgg |
| | | | acccagcaacatggctgtccagggaagaaactacatacctggacccagct |
| | | | accgacaacaacgtgtctcaaccactgtgactcaaaacaacaacagcgaa |
| | | | tttgcttggcctggagcttcttcttgggctctcaatggacgtaatagctt |
| | | | gatgaatcctggacctgctatggccagccacaaagaaggagaggaccgtt |
| | | | tctttcctttgtctggatctttaatttttggcaaacaaggTacCggCaga |
| | | | gacaacgtggatgcggacaaagtcatgataaccaacgaagaagaaattaa |
| | | | aactactaacccggtagcaacggagtcctatggacaagtggccacaaacc |
| | | | accagagtGCCCAGCAACGCATACCGCAAGAATACGCTCAGGCCCAGacc |
| | | | ggttgggttcaaaaccaaggaatacttccgggtatggtttggcaggacag |
| | | | agatgtgtacctgcaaggacccatttgggccaaaattcctcacacggacg |
| | | | gcaactttcacccttctccgctgatgggagggtttggaatgaagcacccg |
| | | | cctcctcagatcctcatcaaaaacacacctgtacctgcggatcctccaac |
| | | | ggccttcaacaaggacaagctgaactctttcatcacccagtattctactg |
| | | | gccaagtcagcgtggagatcgagtgggagctgcagaaggaaaacagcaag |
| | | | cgctggaacccggagatccagtacacttccaactattacaagtctaataa |
| | | | tgttgaatttgctgttaatactgaaggtgtatatagtgaaccccgcccca |
| | | | ttggcaccagatacctgactcgtaatctg |
| 150 | DNA | Adeno- | atggctgccgatggttatcttccagattggctcgaggacaaccttagtga |
| | | Associated | aggaattcgcgagtggtgggctttgaaacctggagcccctcaacccaagg |
| | | Virus 9 | caaatcaacaacatcaagacaacgctcgaggtcttgtgcttccgggttac |
| | | comprising | aaataccttggacccggcaacggactcgacaagggggagccggtcaacgc |
| | | SEQ | agcagacgcggcggccctcgagcacgacaaggcctacgaccagcagctca |
| | | ID NO: 13 | aggrcggagacaacccgtacctcaagtacaaccacgccgacgccgagttc |
| | | | caggagcggctcaaagaagatacgtcttttgggggcaacctcgggcgagc |
| | | | agtcttccaggccaaaaagaggcttcttgaacctcttggtctggttgagg |
| | | | aagcggctaagacggctcctggaaagaagaggcctgtagagcagtctcct |
| | | | caggaaccggactcctccgcgggtattggcaaatcgggtgcacagcccgc |
| | | | taaaaagagactcaatttcggtcagactggcgacacagagtcagtcccag |
| | | | accctcaaccaatcggagaacctcccgcagccccctcaggtgtgggatct |
| | | | cttacaatggcttcaggtggtggcgcaccagtggcagacaataacgaagg |
| | | | tgccgatggagtgggtagttcctcgggaaattggcattgcgattcccaat |
| | | | ggctgggggacagagtcatcaccaccagcacccgaacctgggccctgccc |
| | | | acctacaacaatcacctctacaagcaaatctccaacagcacatctggagg |
| | | | atcttcaaatgacaacgcctacttcggctacagcaccccctgggggtatt |
| | | | ttgacttcaacagattccactgccacttctcaccacgtgactggcagcga |
| | | | ctcatcaacaacaactggggattccggcctaagcgactcaacttcaagct |
| | | | cttcaacattcaggtcaaagaggttacggacaacaatggagtcaagacca |
| | | | tcgccaataaccttaccagcacggtccaggtcttcacggactcagactat |
| | | | cagctcccgtacgtgctcgggtcggctcacgagggctgcctcccgccgtt |
| | | | cccagcggacgttttcatgattcctcagtacgggtatctgacgcttaatg |
| | | | atggaagccaggccgtgggtcgttcgtccttttactgcctggaatatttc |
| | | | ccgtcgcaaatgctaagaacgggtaacaacttccagttcagctacgagtt |
| | | | tgagaacgtacctttccatagcagctacgctcacagccaaagcctggacc |
| | | | gactaatgaatccactcatcgaccaatacttgtactatctctcTaGAact |
| | | | attAACGGTTCTGGACAGAATCAAcaaacgctaaaattcagtgtggccgg |
| | | | acccagcaacatggctgtccagggaagaaactacatacctggacccagct |
| | | | accgacaacaacgtgtctcaaccactgtgactcaaaacaacaacagcgaa |
| | | | tttgcttggcctggagcttcttcttgggctctcaatggacgtaatagctt |
| | | | gatgaatcctggacctgctatggccagccacaaagaaggagaggaccgtt |
| | | | tctttcctttgtctggatctttaatttttggcaaacaaggTacCggCaga |
| | | | gacaacgtggatgcggacaaagtcatgataaccaacgaagaagaaattaa |
| | | | aactactaacccggtagcaacggagtcctatggacaagtggccacaaacc |
| | | | accagagtGCTCAGCAAAGAATCCCCCAAGAATATGCACAAGCGCAAacc |
| | | | ggttgggttcaaaaccaaggaatacttccgggtatggtttggcaggacag |
| | | | agatgtgtacctgcaaggacccatttgggccaaaattcctcacacggacg |
| | | | gcaactttcacccttctccgctgatgggagggtttggaatgaagcacccg |
| | | | cctcctcagatcctcatcaaaaacacacctgtacctgcggatcctccaac |
| | | | ggccttcaacaaggacaagctgaactctttcatcacccagtattctactg |
| | | | gccaagtcagcgtggagatcgagtgggagctgcagaaggaaaacagcaag |
| | | | cgctggaacccggagatccagtacacttccaactattacaagtctaataa |
| | | | tgttgaatttgctgttaatactgaaggtgtatatagtgaaccccgcccca |
| | | | ttggcaccagatacctgactcgtaatctg |
| 151 | DNA | Adeno- | atggctgccgatggttatcttccagattggctcgaggacaaccttagtga |
| | | Associated | aggaattcgcgagtggtgggctttgaaacctggagcccctcaacccaagg |
| | | Virus 9 | caaatcaacaacatcaagacaacgctcgaggtcttgtgcttccgggttac |
| | | comprising | aaataccttggacccggcaacggactcgacaagggggagccggtcaacgc |
| | | SEQ | agcagacgcggcggccctcgagcacgacaaggcctacgaccagcagctca |
| | | ID NO: 14 | aggccggagacaacccgtacctcaagtacaaccacgccgacgccgagttc |
| | | | caggagcggctcaaagaagatacgtcttttgggggcaacctcgggcgagc |
| | | | agtcttccaggccaaaaagaggcttcttgaacctcttggtctggttgagg |
| | | | aagcggctaagacggctcctggaaagaagaggcctgtagagcagtctcct |
| | | | caggaaccggactcctccgcgggtattggcaaatcgggtgcacagcccgc |
| | | | taaaaagagactcaatttcggtcagactggcgacacagagtcagtcccag |
| | | | accctcaaccaatcggagaacctcccgcagccccctcaggtgtgggatct |
| | | | cttacaatggcttcaggtggtggcgcaccagtggcagacaataacgaagg |
| | | | tgccgatggagtgggtagttcctcgggaaattggcattgcgattcccaat |
| | | | ggctgggggacagagtcatcaccaccagcacccgaacctgggccctgccc |
| | | | acctacaacaatcacctctacaagcaaatctccaacagcacatctggagg |
| | | | atcttcaaatgacaacgcctacttcggctacagcaccccctgggggtatt |
| | | | ttgacttcaacagattccactgccacttctcaccacgtgactggcagcga |
| | | | ctcatcaacaacaactggggattccggcctaagcgactcaacttcaagct |
| | | | cttcaacattcaggtcaaagaggttacggacaacaatggagtcaagacca |
| | | | tcgccaataaccttaccagcacggtccaggtcttcacggactcagactat |
| | | | cagctcccgtacgtgctcgggtcggctcacgagggctgcctcccgccgtt |
| | | | cccagcggacgttttcatgattcctcagtacgggtatctgacgcttaatg |
| | | | atggaagccaggccgtgggtcgttcgtccttttactgcctggaatatttc |
| | | | ccgtcgcaaatgctaagaacgggtaacaacttccagttcagctacgagtt |
| | | | tgagaacgtacctttccatagcagctacgctcacagccaaagcctggacc |
| | | | gactaatgaatccactcatcgaccaatacttgtactatctctcTaGAact |
| | | | attAACGGTTCTGGACAGAATCAAcaaacgctaaaattcagtgtggccgg |
| | | | acccagcaacatggctgtccagggaagaaactacatacctggacccagct |
| | | | accgacaacaacgtgtctcaaccactgtgactcaaaacaacaacagcgaa |
| | | | tttgcttggcctggagcttcttcttgggctctcaatggacgtaatagctt |
| | | | gatgaatcctggacctgctatggccagccacaaagaaggagaggaccgtt |
| | | | tctttcctttgtctggatctttaatttttggcaaacaaggTacCggCaga |
| | | | gacaacgtggatgcggacaaagtcatgataaccaacgaagaagaaattaa |
| | | | aactactaacccggtagcaacggagtcctatggacaagtggccacaaacc |
| | | | accagagtGCTCAGCGTTCACAACCGCAAGAACACGCTCAAGCGCAGacc |
| | | | ggttgggttcaaaaccaaggaatacttccgggtatggtttggcaggacag |
| | | | agatgtgtacctgcaaggacccatttgggccaaaattcctcacacggacg |
| | | | gcaactttcacccttctccgctgatgggagggtttggaatgaagcacccg |
| | | | cctcctcagatcctcatcaaaaacacacctgtacctgcggatcctccaac |
| | | | ggccttcaacaaggacaagctgaactctttcatcacccagtattctactg |
| | | | gccaagtcagcgtggagatcgagtgggagctgcagaaggaaaacagcaag |
| | | | cgctggaacccggagatccagtacacttccaactattacaagtctaataa |
| | | | tgttgaatttgctgttaatactgaaggtgtatatagtgaaccccgcccca |
| | | | ttggcaccagatacctgactcgtaatctg |
| 152 | DNA | Adeno- | atggctgccgatggttatcttccagattggctcgaggacaaccttagtga |
| | | Associated | aggaattcgcgagtggtgggctttgaaacctggagcccctcaacccaagg |
| | | Virus 9 | caaatcaacaacatcaagacaacgctcgaggtcttgtgcttccgggttac |
| | | comprising | aaataccttggacccggcaacggactcgacaagggggagccggtcaacgc |
| | | SEQ | agcagacgcggcggccctcgagcacgacaaggcctacgaccagcagctca |
| | | ID NO: 14 | aggccggagacaacccgtacctcaagtacaaccacgccgacgccgagttc |
| | | | caggagcggctcaaagaagatacgtcttttgggggcaacctcgggcgagc |
| | | | agtcttccaggccaaaaagaggcttcttgaacctcttggtctggttgagg |
| | | | aagcggctaagacggctcctggaaagaagaggcctgtagagcagtctcct |
| | | | caggaaccggactcctccgcgggtattggcaaatcgggtgcacagcccgc |
| | | | taaaaagagactcaatttcggtcagactggcgacacagagtcagtcccag |
| | | | accctcaaccaatcggagaacctcccgcagccccctcaggtgtgggatct |
| | | | cttacaatggcttcaggtggtggcgcaccagtggcagacaataacgaagg |
| | | | tgccgatggagtgggtagttcctcgggaaattggcattgcgattcccaat |
| | | | ggctgggggacagagtcatcaccaccagcacccgaacctgggccctgccc |
| | | | acctacaacaatcacctctacaagcaaatctccaacagcacatctggagg |
| | | | atcttcaaatgacaacgcctacttcggctacagcaccccctgggggtatt |
| | | | ttgacttcaacagattccactgccacttctcaccacgtgactggcagcga |
| | | | ctcatcaacaacaactggggattccggcctaagcgactcaacttcaagct |
| | | | cttcaacattcaggtcaaagaggttacggacaacaatggagtcaagacca |
| | | | tcgccaataaccttaccagcacggtccaggtcttcacggactcagactat |
| | | | cagctcccgtacgtgctcgggtcggctcacgagggctgcctcccgccgtt |
| | | | cccagcggacgttttcatgattcctcagtacgggtatctgacgcttaatg |
| | | | atggaagccaggccgtgggtcgttcgtccttttactgcctggaatatttc |
| | | | cgtcgcaaatgctaagaacgggtaacaacttccagttcagctacgagttt |
| | | | gagaacgtacctttccatagcagctacgctcacagccaaagcctggaccg |
| | | | actaatgaatccactcatcgaccaatacttgtactatctctcTaGAacta |
| | | | ttAACGGTTCTGGACAGAATCAAcaaacgctaaaattcagtgtggccgga |
| | | | cccagcaacatggctgtccagggaagaaactacatacctggacccagcta |
| | | | ccgacaacaacgtgtctcaaccactgtgactcaaaacaacaacagcgaat |
| | | | ttgcttggcctggagcttcttcttgggctctcaatggacgtaatagcttg |
| | | | atgaatcctggacctgctatggccagccacaaagaaggagaggaccgttt |
| | | | ctttcctttgtctggatctttaatttttggcaaacaaggTacCggCagag |
| | | | acaacgtggatgcggacaaagtcatgataaccaacgaagaagaaattaaa |
| | | | actactaacccggtagcaacggagtcctatggacaagtggccacaaacca |
| | | | ccagagtGCACAGAGAAGTCAGCCACAGGAACATGCACAGGCCCAGaccg |
| | | | gttgggttcaaaaccaaggaatacttccgggtatggtttggcaggacaga |
| | | | gatgtgtacctgcaaggacccatttgggccaaaattcctcacacggacgg |
| | | | caactttcacccttctccgctgatgggagggtttggaatgaagcacccgc |
| | | | ctcctcagatcctcatcaaaaacacacctgtacctgcggatcctccaacg |
| | | | gccttcaacaaggacaagctgaactctttcatcacccagtattctactgg |
| | | | ccaagtcagcgtggagatcgagtgggagctgcagaaggaaaacagcaagc |
| | | | gctggaacccggagatccagtacacttccaactattacaagtctaataat |
| | | | gttgaatttgctgttaatactgaaggtgtatatagtgaaccccgccccat |
| | | | tggcaccagatacctgactcgtaatctg |
| 153 | DNA | Adeno- | atggctgccgatggttatcttccagattggctcgaggacaaccttagtga |
| | | Associated | aggaattcgcgagtggtgggctttgaaacctggagcccctcaacccaagg |
| | | Virus 9 | caaatcaacaacatcaagacaacgctcgaggtcttgtgcttccgggttac |
| | | comprising | aaataccttggacccggcaacggactcgacaagggggagccggtcaacgc |
| | | SEQ | agcagacgcggcggccctcgagcacgacaaggcctacgaccagcagctca |
| | | ID NO: 14 | aggccggagacaacccgtacctcaagtacaaccacgccgacgccgagttc |
| | | | caggagcggctcaaagaagatacgtcttttgggggcaacctcgggcgagc |
| | | | agtcttccaggccaaaaagaggcttcttgaacctcttggtctggttgagg |
| | | | aagcggctaagacggctcctggaaagaagaggcctgtagagcagtctcct |
| | | | caggaaccggactcctccgcgggtattggcaaatcgggtgcacagcccgc |
| | | | taaaaagagactcaatttcggtcagactggcgacacagagtcagtcccag |
| | | | accctcaaccaatcggagaacctcccgcagccccctcaggtgtgggatct |
| | | | cttacaatggcttcaggtggtggcgcaccagtggcagacaataacgaagg |
| | | | tgccgatggagtgggtagttcctcgggaaattggcattgcgattcccaat |
| | | | ggctgggggacagagtcatcaccaccagcacccgaacctgggccctgccc |
| | | | acctacaacaatcacctctacaagcaaatctccaacagcacatctggagg |
| | | | atcttcaaatgacaacgcctacttcggctacagcaccccctgggggtatt |
| | | | ttgacttcaacagattccactgccacttctcaccacgtgactggcagcga |
| | | | ctcatcaacaacaactggggattccggcctaagcgactcaacttcaagct |
| | | | cttcaacattcaggtcaaagaggttacggacaacaatggagtcaagacca |
| | | | tcgccaataaccttaccagcacggtccaggtcttcacggactcagactat |
| | | | cagctcccgtacgtgctcgggtcggctcacgagggctgcctcccgccgtt |
| | | | cccagcggacgttttcatgattcctcagtacgggtatctgacgcttaatg |
| | | | atggaagccaggccgtgggtcgttcgtccttttactgcctggaatatttc |
| | | | ccgtcgcaaatgctaagaacgggtaacaacttccagttcagctacgagtt |
| | | | tgagaacgtacctttccatagcagctacgctcacagccaaagcctggacc |
| | | | gactaatgaatccactcatcgaccaatacttgtactatctctcTaGAact |
| | | | attAACGGTTCTGGACAGAATCAAcaaacgctaaaattcagtgtggccgg |
| | | | acccagcaacatggctgtccagggaagaaactacatacctggacccagct |
| | | | accgacaacaacgtgtctcaaccactgtgactcaaaacaacaacagcgaa |
| | | | tttgcttggcctggagcttcttcttgggctctcaatggacgtaatagctt |
| | | | gatgaatcctggacctgctatggccagccacaaagaaggagaggaccgtt |
| | | | tctttcctttgtctggatctttaatttttggcaaacaaggTacCggCaga |
| | | | gacaacgtggatgcggacaaagtcatgataaccaacgaagaagaaattaa |
| | | | aactactaacccggtagcaacggagtcctatggacaagtggccacaaacc |
| | | | accagagtGCGCAACGGTCACAACCGCAAGAGCACGCCCAAGCACAAacc |
| | | | ggttgggttcaaaaccaaggaatacttccgggtatggtttggcaggacag |
| | | | agatgtgtacctgcaaggacccatttgggccaaaattcctcacacggacg |
| | | | gcaactttcacccttctccgctgatgggagggtttggaatgaagcacccg |
| | | | cctcctcagatcctcatcaaaaacacacctgtacctgcggatcctccaac |
| | | | ggccttcaacaaggacaagctgaactctttcatcacccagtattctactg |
| | | | gccaagtcagcgtggagatcgagtgggagctgcagaaggaaaacagcaag |
| | | | cgctggaacccggagatccagtacacttccaactattacaagtctaataa |
| | | | tgttgaatttgctgttaatactgaaggtgtatatagtgaaccccgcccca |
| | | | ttggcaccagatacctgactcgtaatctg |
| 154 | DNA | Adeno- | atggctgccgatggttatcttccagattggctcgaggacaaccttagtga |
| | | Associated | aggaattcgcgagtggtgggctttgaaacctggagcccctcaacccaagg |
| | | Virus 9 | caaatcaacaacatcaagacaacgctcgaggtcttgtgcttccgggttac |
| | | comprising | aaataccttggacccggcaacggactcgacaagggggagccggtcaacgc |
| | | SEQ | agcagacgcggcggccctcgagcacgacaaggcctacgaccagcagctca |
| | | ID NO: 14 | aggccggagacaacccgtacctcaagtacaaccacgccgacgccgagttc |
| | | | caggagcggctcaaagaagatacgtcttttgggggcaacctcgggcgagc |
| | | | agtcttccaggccaaaaagaggcttcttgaacctcttggtctggttgagg |
| | | | aagcggctaagacggctcctggaaagaagaggcctgtagagcagtctcct |
| | | | caggaaccggactcctccgcgggtattggcaaatcgggtgcacagcccgc |
| | | | taaaaagagactcaatttcggtcagactggcgacacagagtcagtcccag |
| | | | accctcaaccaatcggagaacctcccgcagccccctcaggtgtgggatct |
| | | | cttacaatggcttcaggtggtggcgcaccagtggcagacaataacgaagg |
| | | | tgccgatggagtgggtagttcctcgggaaattggcattgcgattcccaat |
| | | | ggctgggggacagagtcatcaccaccagcacccgaacctgggccctgccc |
| | | | acctacaacaatcacctctacaagcaaatctccaacagcacatctggagg |
| | | | atcttcaaatgacaacgcctacttcggctacagcaccccctgggggtatt |
| | | | ttgacttcaacagattccactgccacttctcaccacgtgactggcagcga |
| | | | ctcatcaacaacaactggggattccggcctaagcgactcaacttcaagct |
| | | | cttcaacattcaggtcaaagaggttacggacaacaatggagtcaagacca |
| | | | tcgccaataaccttaccagcacggtccaggtcttcacggactcagactat |
| | | | cagctcccgtacgtgctcgggtcggctcacgagggctgcctcccgccgtt |
| | | | cccagcggacgttttcatgattcctcagtacgggtatctgacgcttaatg |
| | | | atggaagccaggccgtgggtcgttcgtccttttactgcctggaatatttc |
| | | | ccgtcgcaaatgctaagaacgggtaacaacttccagttcagctacgagtt |
| | | | tgagaacgtacctttccatagcagctacgctcacagccaaagcctggacc |
| | | | gactaatgaatccactcatcgaccaatacttgtactatctctcTaGAact |
| | | | attAACGGTTCTGGACAGAATCAAcaaacgctaaaattcagtgtggccgg |
| | | | acccagcaacatggctgtccagggaagaaactacatacctggacccagct |
| | | | accgacaacaacgtgtctcaaccactgtgactcaaaacaacaacagcgaa |
| | | | tttgcttggcctggagcttcttcttgggctctcaatggacgtaatagctt |
| | | | gatgaatcctggacctgctatggccagccacaaagaaggagaggaccgtt |
| | | | tctttcctttgtctggatctttaatttttggcaaacaaggTacCggCaga |
| | | | gacaacgtggatgcggacaaagtcatgataaccaacgaagaagaaattaa |
| | | | aactactaacccggtagcaacggagtcctatggacaagtggccacaaacc |
| | | | accagagtGCTCAGCGTAGTCAACCCCAAGAGCATGCGCAAGCTCAAacc |
| | | | ggttgggttcaaaaccaaggaatacttccgggtatggtttggcaggacag |
| | | | agatgtgtacctgcaaggacccatttgggccaaaattcctcacacggacg |
| | | | gcaactttcacccttctccgctgatgggagggtttggaatgaagcacccg |
| | | | cctcctcagatcctcatcaaaaacacacctgtacctgcggatcctccaac |
| | | | ggccttcaacaaggacaagctgaactctttcatcacccagtattctactg |
| | | | gccaagtcagcgtggagatcgagtgggagctgcagaaggaaaacagcaag |
| | | | cgctggaacccggagatccagtacacttccaactattacaagtctaataa |
| | | | tgttgaatttgctgttaatactgaaggtgtatatagtgaaccccgcccca |
| | | | ttggcaccagatacctgactcgtaatctg |
| 155 | DNA | Adeno- | atggctgccgatggttatcttccagattggctcgaggacaaccttagtga |
| | | Associated | aggaattcgcgagtggtgggctttgaaacctggagcccctcaacccaagg |
| | | Virus 9 | caaatcaacaacatcaagacaacgctcgaggtcttgtgcttccgggttac |
| | | comprising | aaataccttggacccggcaacggactcgacaagggggagccggtcaacgc |
| | | SEQ | agcagacgcggcggccctcgagcacgacaaggcctacgaccagcagctca |
| | | ID NO: 14 | aggccggagacaacccgtacctcaagtacaaccacgccgacgccgagttc |
| | | | caggagcggctcaaagaagatacgtcttttgggggcaacctcgggcgagc |
| | | | agtcttccaggccaaaaagaggcttcttgaacctcttggtctggttgagg |
| | | | aagcggctaagacggctcctggaaagaagaggcctgtagagcagtctcct |
| | | | caggaaccggactcctccgcgggtattggcaaatcgggtgcacagcccgc |
| | | | taaaaagagactcaatttcggtcagactggcgacacagagtcagtcccag |
| | | | accctcaaccaatcggagaacctcccgcagccccctcaggtgtgggatct |
| | | | cttacaatggcttcaggtggtggcgcaccagtggcagacaataacgaagg |
| | | | tgccgatggagtgggtagttcctcgggaaattggcattgcgattcccaat |
| | | | ggctgggggacagagtcatcaccaccagcacccgaacctgggccctgccc |
| | | | acctacaacaatcacctctacaagcaaatctccaacagcacatctggagg |
| | | | atcttcaaatgacaacgcctacttcggctacagcaccccctgggggtatt |
| | | | ttgacttcaacagattccactgccacttctcaccacgtgactggcagcga |
| | | | ctcatcaacaacaactggggattccggcctaagcgactcaacttcaagct |
| | | | cttcaacattcaggtcaaagaggttacggacaacaatggagtcaagacca |
| | | | tcgccaataaccttaccagcacggtccaggtcttcacggactcagactat |
| | | | cagctcccgtacgtgctcgggtcggctcacgagggctgcctcccgccgtt |
| | | | cccagcggacgttttcatgattcctcagtacgggtatctgacgcttaatg |
| | | | atggaagccaggccgtgggtcgttcgtccttttactgcctggaatatttc |
| | | | ccgtcgcaaatgctaagaacgggtaacaacttccagttcagctacgagtt |
| | | | tgagaacgtacctttccatagcagctacgctcacagccaaagcctggacc |
| | | | gactaatgaatccactcatcgaccaatacttgtactatctctcTaGAact |
| | | | attAACGGTTCTGGACAGAATCAAcaaacgctaaaattcagtgtggccgg |
| | | | acccagcaacatggctgtccagggaagaaactacatacctggacccagct |
| | | | accgacaacaacgtgtctcaaccactgtgactcaaaacaacaacagcgaa |
| | | | tttgcttggcctggagcttcttcttgggctctcaatggacgtaatagctt |
| | | | gatgaatcctggacctgctatggccagccacaaagaaggagaggaccgtt |
| | | | tctttcctttgtctggatctttaatttttggcaaacaaggTacCggCaga |
| | | | gacaacgtggatgcggacaaagtcatgataaccaacgaagaagaaattaa |
| | | | aactactaacccggtagcaacggagtcctatggacaagtggccacaaacc |
| | | | accagagtGCCCAAAGAAGCCAGCCTCAGGAACACGCTCAGGCGCAGacc |
| | | | ggttgggttcaaaaccaaggaatacttccgggtatggtttggcaggacag |
| | | | agatgtgtacctgcaaggacccatttgggccaaaattcctcacacggacg |
| | | | gcaactttcacccttctccgctgatgggagggtttggaatgaagcacccg |
| | | | cctcctcagatcctcatcaaaaacacacctgtacctgcggatcctccaac |
| | | | ggccttcaacaaggacaagctgaactctttcatcacccagtattctactg |
| | | | gccaagtcagcgtggagatcgagtgggagctgcagaaggaaaacagcaag |
| | | | cgctggaacccggagatccagtacacttccaactattacaagtctaataa |
| | | | tgttgaatttgctgttaatactgaaggtgtatatagtgaaccccgcccca |
| | | | ttggcaccagatacctgactcgtaatctg |
| 156 | DNA | Adeno- | atggctgccgatggttatcttccagattggctcgaggacaaccttagtga |
| | | Associated | aggaattcgcgagtggtgggctttgaaacctggagcccctcaacccaagg |
| | | Virus 9 | caaatcaacaacatcaagacaacgctcgaggtcttgtgcttccgggttac |
| | | comprising | aaataccttggacccggcaacggactcgacaagggggagccggtcaacgc |
| | | SEQ | agcagacgcggcggccctcgagcacgacaaggcctacgaccagcagctca |
| | | ID NO: 14 | aggccggagacaacccgtacctcaagtacaaccacgccgacgccgagttc |
| | | | caggagcggctcaaagaagatacgtcttttgggggcaacctcgggcgagc |
| | | | agtcttccaggccaaaaagaggcttcttgaacctcttggtctggttgagg |
| | | | aagcggctaagacggctcctggaaagaagaggcctgtagagcagtctcct |
| | | | caggaaccggactcctccgcgggtattggcaaatcgggtgcacagcccgc |
| | | | taaaaagagactcaatttcggtcagactggcgacacagagtcagtcccag |
| | | | accctcaaccaatcggagaacctcccgcagccccctcaggtgtgggatct |
| | | | cttacaatggcttcaggtggtggcgcaccagtggcagacaataacgaagg |
| | | | tgccgatggagtgggtagttcctcgggaaattggcattgcgattcccaat |
| | | | ggctgggggacagagtcatcaccaccagcacccgaacctgggccctgccc |
| | | | acctacaacaatcacctctacaagcaaatctccaacagcacatctggagg |
| | | | atcttcaaatgacaacgcctacttcggctacagcaccccctgggggtatt |
| | | | ttgacttcaacagattccactgccacttctcaccacgtgactggcagcga |
| | | | ctcatcaacaacaactggggattccggcctaagcgactcaacttcaagct |
| | | | cttcaacattcaggtcaaagaggttacggacaacaatggagtcaagacca |
| | | | tcgccaataaccttaccagcacggtccaggtcttcacggactcagactat |
| | | | cagctcccgtacgtgctcgggtcggctcacgagggctgcctcccgccgtt |
| | | | cccagcggacgttttcatgattcctcagtacgggtatctgacgcttaatg |
| | | | atggaagccaggccgtgggtcgttcgtccttttactgcctggaatatttc |
| | | | ccgtcgcaaatgctaagaacgggtaacaacttccagttcagctacgagtt |
| | | | tgagaacgtacctttccatagcagctacgctcacagccaaagcctggacc |
| | | | gactaatgaatccactcatcgaccaatacttgtactatctctcTaGAact |
| | | | attAACGGTTCTGGACAGAATCAAcaaacgctaaaattcagtgtggccgg |
| | | | acccagcaacatggctgtccagggaagaaactacatacctggacccagct |
| | | | accgacaacaacgtgtctcaaccactgtgactcaaaacaacaacagcgaa |
| | | | tttgcttggcctggagcttcttcttgggctctcaatggacgtaatagctt |
| | | | gatgaatcctggacctgctatggccagccacaaagaaggagaggaccgtt |
| | | | tctttcctttgtctggatctttaatttttggcaaacaaggTacCggCaga |
| | | | gacaacgtggatgcggacaaagtcatgataaccaacgaagaagaaattaa |
| | | | aactactaacccggtagcaacggagtcctatggacaagtggccacaaacc |
| | | | accagagtGCGCAACGATCTCAGCCTCAGGAGCATGCCCAGGCACAAacc |
| | | | ggttgggttcaaaaccaaggaatacttccgggtatggtttggcaggacag |
| | | | agatgtgtacctgcaaggacccatttgggccaaaattcctcacacggacg |
| | | | gcaactttcacccttctccgctgatgggagggtttggaatgaagcacccg |
| | | | cctcctcagatcctcatcaaaaacacacctgtacctgcggatcctccaac |
| | | | ggccttcaacaaggacaagctgaactctttcatcacccagtattctactg |
| | | | gccaagtcagcgtggagatcgagtgggagctgcagaaggaaaacagcaag |
| | | | cgctggaacccggagatccagtacacttccaactattacaagtctaataa |
| | | | tgttgaatttgctgttaatactgaaggtgtatatagtgaaccccgcccca |
| | | | ttggcaccagatacctgactcgtaatctg |
| 157 | DNA | Adeno- | atggctgccgatggttatcttccagattggctcgaggacaaccttagtga |
| | | Associated | aggaattcgcgagtggtgggctttgaaacctggagcccctcaacccaagg |
| | | Virus 9 | caaatcaacaacatcaagacaacgctcgaggtcttgtgcttccgggttac |
| | | comprising | aaataccttggacccggcaacggactcgacaagggggagccggtcaacgc |
| | | SEQ | agcagacgcggcggccctcgagcacgacaaggcctacgaccagcagctca |
| | | ID NO: 14 | aggrcggagacaacccgtacctcaagtacaaccacgccgacgccgagttc |
| | | | caggagggctcaaagaagatacgtcttttgggggcaacctcgggcgagca |
| | | | gtcttccaggccaaaaagaggcttcttgaacctcttggtctggttgagga |
| | | | agcggctaagacggctcctggaaagaagaggcctgtagagcagtctcctc |
| | | | aggaaccggactcctccgcgggtattggcaaatcgggtgcacagcccgct |
| | | | aaaaagagactcaatttcggtcagactggcgacacagagtcagtcccaga |
| | | | ccctcaaccaatcggagaacctcccgcagccccctcaggtgtgggatctc |
| | | | ttacaatggcttcaggtggtggcgcaccagtggcagacaataacgaaggt |
| | | | gccgatggagtgggtagttcctcgggaaattggcattgcgattcccaatg |
| | | | gctgggggacagagtcatcaccaccagcacccgaacctgggccctgccca |
| | | | cctacaacaatcacctctacaagcaaatctccaacagcacatctggagga |
| | | | tcttcaaatgacaacgcctacttcggctacagcaccccctgggggtattt |
| | | | tgacttcaacagattccactgccacttctcaccacgtgactggcagcgac |
| | | | tcatcaacaacaactggggattccggcctaagcgactcaacttcaagctc |
| | | | ttcaacattcaggtcaaagaggttacggacaacaatggagtcaagaccat |
| | | | cgccaataaccttaccagcacggtccaggtcttcacggactcagactatc |
| | | | agctcccgtacgtgctcgggtcggctcacgagggctgcctcccgccgttc |
| | | | ccagcggacgttttcatgattcctcagtacgggtatctgacgcttaatga |
| | | | tggaagccaggccgtgggtcgttcgtccttttactgcctggaatatttcc |
| | | | cgtcgcaaatgctaagaacgggtaacaacttccagttcagctacgagttt |
| | | | gagaacgtacctttccatagcagctacgctcacagccaaagcctggaccg |
| | | | actaatgaatccactcatcgaccaatacttgtactatctctcTaGAacta |
| | | | ttAACGGTTCTGGACAGAATCAAcaaacgctaaaattcagtgtggccgga |
| | | | cccagcaacatggctgtccagggaagaaactacatacctggacccagcta |
| | | | ccgacaacaacgtgtctcaaccactgtgactcaaaacaacaacagcgaat |
| | | | ttgcttggcctggagcttcttcttgggctctcaatggacgtaatagcttg |
| | | | atgaatcctggacctgctatggccagccacaaagaaggagaggaccgttt |
| | | | ctttcctttgtctggatctttaatttttggcaaacaaggTacCggCagag |
| | | | acaacgtggatgcggacaaagtcatgataaccaacgaagaagaaattaaa |
| | | | actactaacccggtagcaacggagtcctatggacaagtggccacaaacca |
| | | | ccagagtGCCCAACGCTCTCAGCCACAAGAGCATGCCCAAGCACAGaccg |
| | | | gttgggttcaaaaccaaggaatacttccgggtatggtttggcaggacaga |
| | | | gatgtgtacctgcaaggacccatttgggccaaaattcctcacacggacgg |
| | | | caactttcacccttctccgctgatgggagggtttggaatgaagcacccgc |
| | | | ctcctcagatcctcatcaaaaacacacctgtacctgcggatcctccaacg |
| | | | gccttcaacaaggacaagctgaactctttcatcacccagtattctactgg |
| | | | ccaagtcagcgtggagatcgagtgggagctgcagaaggaaaacagcaagc |
| | | | gctggaacccggagatccagtacacttccaactattacaagtctaataat |
| | | | gttgaatttgctgttaatactgaaggtgtatatagtgaaccccgccccat |
| | | | tggcaccagatacctgactcgtaatctg |
| 158 | DNA | Adeno- | atggctgccgatggttatcttccagattggctcgaggacaaccttagtga |
| | | Associated | aggaattcgcgagtggtgggctttgaaacctggagcccctcaacccaagg |
| | | Virus 9 | caaatcaacaacatcaagacaacgctcgaggtcttgtgcttccgggttac |
| | | comprising | aaataccttggacccggcaacggactcgacaagggggagccggtcaacgc |
| | | SEQ | agcagacgcggcggccctcgagcacgacaaggcctacgaccagcagctca |
| | | ID NO: 14 | aggccggagacaacccgtacctcaagtacaaccacgccgacgccgagttc |
| | | | caggagcggctcaaagaagatacgtcttttgggggcaacctgggcgagca |
| | | | gtcttccaggccaaaaagaggcttcttgaacctcttggtctggttgagga |
| | | | agcggctaagacggctcctggaaagaagaggcctgtagagcagtctcctc |
| | | | aggaaccggactcctccgcgggtattggcaaatcgggtgcacagcccgct |
| | | | aaaaagagactcaatttcggtcagactggcgacacagagtcagtcccaga |
| | | | ccctcaaccaatcggagaacctcccgcagccccctcaggtgtgggatctc |
| | | | ttacaatggcttcaggtggtggcgcaccagtggcagacaataacgaaggt |
| | | | gccgatggagtgggtagttcctcgggaaattggcattgcgattcccaatg |
| | | | gctgggggacagagtcatcaccaccagcacccgaacctgggccctgccca |
| | | | cctacaacaatcacctctacaagcaaatctccaacagcacatctggagga |
| | | | tcttcaaatgacaacgcctacttcggctacagcaccccctgggggtattt |
| | | | tgacttcaacagattccactgccacttctcaccacgtgactggcagcgac |
| | | | tcatcaacaacaactggggattccggcctaagcgactcaacttcaagctc |
| | | | ttcaacattcaggtcaaagaggttacggacaacaatggagtcaagaccat |
| | | | cgccaataaccttaccagcacggtccaggtcttcacggactcagactatc |
| | | | agctcccgtacgtgctcgggtcggctcacgagggctgcctcccgccgttc |
| | | | ccagcggacgttttcatgattcctcagtacgggtatctgacgcttaatga |
| | | | tggaagccaggccgtgggtcgttcgtccttttactgcctggaatatttcc |
| | | | cgtcgcaaatgctaagaacgggtaacaacttccagttcagctacgagttt |
| | | | gagaacgtacctttccatagcagctacgctcacagccaaagcctggaccg |
| | | | actaatgaatccactcatcgaccaatacttgtactatctctcTaGAacta |
| | | | ttAACGGTTCTGGACAGAATCAAcaaacgctaaaattcagtgtggccgga |
| | | | cccagcaacatggctgtccagggaagaaactacatacctggacccagcta |
| | | | ccgacaacaacgtgtctcaaccactgtgactcaaaacaacaacagcgaat |
| | | | ttgcttggcctggagcttcttcttgggctctcaatggacgtaatagcttg |
| | | | atgaatcctggacctgctatggccagccacaaagaaggagaggaccgttt |
| | | | ctttcctttgtctggatctttaatttttggcaaacaaggTacCggCagag |
| | | | acaacgtggatgcggacaaagtcatgataaccaacgaagaagaaattaaa |
| | | | actactaacccggtagcaacggagtcctatggacaagtggccacaaacca |
| | | | ccagagtGCGCAGCGGAGCCAACCTCAAGAGCACGCGCAAGCCCAGaccg |
| | | | gttgggttcaaaaccaaggaatacttccgggtatggtttggcaggacaga |
| | | | gatgtgtacctgcaaggacccatttgggccaaaattcctcacacggacgg |
| | | | caactttcacccttctccgctgatgggagggtttggaatgaagcacccgc |
| | | | ctcctcagatcctcatcaaaaacacacctgtacctgcggatcctccaacg |
| | | | gccttcaacaaggacaagctgaactctttcatcacccagtattctactgg |
| | | | ccaagtcagcgtggagatcgagtgggagctgcagaaggaaaacagcaagc |
| | | | gctggaacccggagatccagtacacttccaactattacaagtctaataat |
| | | | gttgaatttgctgttaatactgaaggtgtatatagtgaaccccgccccat |
| | | | tggcaccagatacctgactcgtaatctg |
| 159 | DNA | Adeno- | atggctgccgatggttatcttccagattggctcgaggacaaccttagtga |
| | | Associated | aggaattcgcgagtggtgggctttgaaacctggagcccctcaacccaagg |
| | | Virus 9 | caaatcaacaacatcaagacaacgctcgaggtcttgtgcttccgggttac |
| | | comprising | aaataccttggacccggcaacggactcgacaagggggagccggtcaacgc |
| | | SEQ | agcagacgcggcggccctcgagcacgacaaggcctacgaccagcagctca |
| | | ID NO: 14 | aggccggagacaacccgtacctcaagtacaaccacgccgacgccgagttc |
| | | | caggagcggctcaaagaagatacgtcttttgggggcaacctgggcgagca |
| | | | gtcttccaggccaaaaagaggcttcttgaacctcttggtctggttgagga |
| | | | agcggctaagacggctcctggaaagaagaggcctgtagagcagtctcctc |
| | | | aggaaccggactcctccgcgggtattggcaaatcgggtgcacagcccgct |
| | | | aaaaagagactcaatttcggtcagactggcgacacagagtcagtcccaga |
| | | | ccctcaaccaatcggagaacctcccgcagccccctcaggtgtgggatctc |
| | | | ttacaatggcttcaggtggtggcgcaccagtggcagacaataacgaaggt |
| | | | gccgatggagtgggtagttcctcgggaaattggcattgcgattcccaatg |
| | | | gctgggggacagagtcatcaccaccagcacccgaacctgggccctgccca |
| | | | cctacaacaatcacctctacaagcaaatctccaacagcacatctggagga |
| | | | tcttcaaatgacaacgcctacttcggctacagcaccccctgggggtattt |
| | | | tgacttcaacagattccactgccacttctcaccacgtgactggcagcgac |
| | | | tcatcaacaacaactggggattccggcctaagcgactcaacttcaagctc |
| | | | ttcaacattcaggtcaaagaggttacggacaacaatggagtcaagaccat |
| | | | cgccaataaccttaccagcacggtccaggtcttcacggactcagactatc |
| | | | agctcccgtacgtgctcgggtcggctcacgagggctgcctcccgccgttc |
| | | | ccagcggacgttttcatgattcctcagtacgggtatctgacgcttaatga |
| | | | tggaagccaggccgtgggtcgttcgtccttttactgcctggaatatttcc |
| | | | cgtcgcaaatgctaagaacgggtaacaacttccagttcagctacgagttt |
| | | | gagaacgtacctttccatagcagctacgctcacagccaaagcctggaccg |
| | | | actaatgaatccactcatcgaccaatacttgtactatctctcTaGAacta |
| | | | ttAACGGTTCTGGACAGAATCAAcaaacgctaaaattcagtgtggccgga |
| | | | cccagcaacatggctgtccagggaagaaactacatacctggacccagcta |
| | | | ccgacaacaacgtgtctcaaccactgtgactcaaaacaacaacagcgaat |
| | | | ttgcttggcctggagcttcttcttgggctctcaatggacgtaatagcttg |
| | | | atgaatcctggacctgctatggccagccacaaagaaggagaggaccgttt |
| | | | ctttcctttgtctggatctttaatttttggcaaacaaggTacCggCagag |
| | | | acaacgtggatgcggacaaagtcatgataaccaacgaagaagaaattaaa |
| | | | actactaacccggtagcaacggagtcctatggacaagtggccacaaacca |
| | | | ccagagtGCGCAGAGAAGCCAACCGCAGGAACACGCGCAGGCGCAAaccg |
| | | | gttgggttcaaaaccaaggaatacttccgggtatggtttggcaggacaga |
| | | | gatgtgtacctgcaaggacccatttgggccaaaattcctcacacggacgg |
| | | | caactttcacccttatccgctgatgggagggtttggaatgaagcacccgc |
| | | | ctcctcagatcctcatcaaaaacacacctgtacctgcggatcctccaacg |
| | | | gccttcaacaaggacaagctgaactctttcatcacccagtattctactgg |
| | | | ccaagtcagcgtggagatcgagtgggagctgcagaaggaaaacagcaagc |
| | | | gctggaacccggagatccagtacacttccaactattacaagtctaataat |
| | | | gttgaatttgctgttaatactgaaggtgtatatagtgaaccccgccccat |
| | | | tggcaccagatacctgactcgtaatctg |
| 160 | DNA | Adeno- | atggctgccgatggttatcttccagattggctcgaggacaaccttagtga |
| | | Associated | aggaattcgcgagtggtgggctttgaaacctggagcccctcaacccaagg |
| | | Virus 9 | caaatcaacaacatcaagacaacgctcgaggtcttgtgcttccgggttac |
| | | comprising | aaataccttggacccggcaacggactcgacaagggggagccggtcaacgc |
| | | SEQ | agcagacgcggcggccctcgagcacgacaaggcctacgaccagcagctca |
| | | ID NO: 14 | aggccggagacaacccgtacctcaagtacaaccacgccgacgccgagttc |
| | | | caggagcggctcaaagaagatacgtcttttgggggcaacctcgggcgagc |
| | | | agtcttccaggccaaaaagaggcttcttgaacctcttggtctggttgagg |
| | | | aagcggctaagacggctcctggaaagaagaggcctgtagagcagtctcct |
| | | | caggaaccggactcctccgcgggtattggcaaatcgggtgcacagcccgc |
| | | | taaaaagagactcaatttcggtcagactggcgacacagagtcagtcccag |
| | | | accctcaaccaatcggagaacctcccgcagccccctcaggtgtgggatct |
| | | | cttacaatggcttcaggtggtggcgcaccagtggcagacaataacgaagg |
| | | | tgccgatggagtgggtagttcctcgggaaattggcattgcgattcccaat |
| | | | ggctgggggacagagtcatcaccaccagcacccgaacctgggccctgccc |
| | | | acctacaacaatcacctctacaagcaaatctccaacagcacatctggagg |
| | | | atcttcaaatgacaacgcctacttcggctacagcaccccctgggggtatt |
| | | | ttgacttcaacagattccactgccacttctcaccacgtgactggcagcga |
| | | | ctcatcaacaacaactggggattccggcctaagcgactcaacttcaagct |
| | | | cttcaacattcaggtcaaagaggttacggacaacaatggagtcaagacca |
| | | | tcgccaataaccttaccagcacggtccaggtcttcacggactcagactat |
| | | | cagctcccgtacgtgctcgggtcggctcacgagggctgcctcccgccgtt |
| | | | cccagcggacgttttcatgattcctcagtacgggtatctgacgcttaatg |
| | | | atggaagccaggccgtgggtcgttcgtccttttactgcctggaatatttc |
| | | | ccgtcgcaaatgctaagaacgggtaacaacttccagttcagctacgagtt |
| | | | tgagaacgtacctttccatagcagctacgctcacagccaaagcctggacc |
| | | | gactaatgaatccactcatcgaccaatacttgtactatctctcTaGAact |
| | | | attAACGGTTCTGGACAGAATCAAcaaacgctaaaattcagtgtggccgg |
| | | | acccagcaacatggctgtccagggaagaaactacatacctggacccagct |
| | | | accgacaacaacgtgtctcaaccactgtgactcaaaacaacaacagcgaa |
| | | | tttgcttggcctggagcttcttcttgggctctcaatggacgtaatagctt |
| | | | gatgaatcctggacctgctatggccagccacaaagaaggagaggaccgtt |
| | | | tctttcctttgtctggatctttaatttttggcaaacaaggTacCggCaga |
| | | | gacaacgtggatgcggacaaagtcatgataaccaacgaagaagaaattaa |
| | | | aactactaacccggtagcaacggagtcctatggacaagtggccacaaacc |
| | | | accagagtGCCCAACGTAGTCAGCCACAGGAACATGCACAGGCACAAacc |
| | | | ggttgggttcaaaaccaaggaatacttccgggtatggtttggcaggacag |
| | | | agatgtgtacctgcaaggacccatttgggccaaaattcctcacacggacg |
| | | | gcaactttcacccttctccgctgatgggagggtttggaatgaagcacccg |
| | | | cctcctcagatcctcatcaaaaacacacctgtacctgcggatcctccaac |
| | | | ggccttcaacaaggacaagctgaactctttcatcacccagtattctactg |
| | | | gccaagtcagcgtggagatcgagtgggagctgcagaaggaaaacagcaag |
| | | | cgctggaacccggagatccagtacacttccaactattacaagtctaataa |
| | | | tgttgaatttgctgttaatactgaaggtgtatatagtgaaccccgcccca |
| | | | ttggcaccagatacctgactcgtaatctg |
| 161 | DNA | Adeno- | atggctgccgatggttatcttccagattggctcgaggacaaccttagtga |
| | | Associated | aggaattcgcgagtggtgggctttgaaacctggagcccctcaacccaagg |
| | | Virus 9 | caaatcaacaacatcaagacaacgctcgaggtcttgtgcttccgggttac |
| | | comprising | aaataccttggacccggcaacggactcgacaagggggagccggtcaacgc |
| | | SEQ | agcagacgcggcggccctcgagcacgacaaggcctacgaccagcagctca |
| | | ID NO: 15 | aggccggagacaacccgtacctcaagtacaaccacgccgacgccgagttc |
| | | | caggagcggctcaaagaagatacgtcttttgggggcaacctcgggcgagc |
| | | | agtcttccaggccaaaaagaggcttcttgaacctcttggtctggttgagg |
| | | | aagcggctaagacggctcctggaaagaagaggcctgtagagcagtctcct |
| | | | caggaaccggactcctccgcgggtattggcaaatcgggtgcacagcccgc |
| | | | taaaaagagactcaatttcggtcagactggcgacacagagtcagtcccag |
| | | | accctcaaccaatcggagaacctcccgcagccccctcaggtgtgggatct |
| | | | cttacaatggcttcaggtggtggcgcaccagtggcagacaataacgaagg |
| | | | tgccgatggagtgggtagttcctcgggaaattggcattgcgattcccaat |
| | | | ggctgggggacagagtcatcaccaccagcacccgaacctgggccctgccc |
| | | | acctacaacaatcacctctacaagcaaatctccaacagcacatctggagg |
| | | | atcttcaaatgacaacgcctacttcggctacagcaccccctgggggtatt |
| | | | ttgacttcaacagattccactgccacttctcaccacgtgactggcagcga |
| | | | ctcatcaacaacaactggggattccggcctaagcgactcaacttcaagct |
| | | | cttcaacattcaggtcaaagaggttacggacaacaatggagtcaagacca |
| | | | tcgccaataaccttaccagcacggtccaggtcttcacggactcagactat |
| | | | cagctcccgtacgtgctcgggtcggctcacgagggctgcctcccgccgtt |
| | | | cccagcggacgttttcatgattcctcagtacgggtatctgacgcttaatg |
| | | | atggaagccaggccgtgggtcgttcgtccttttactgcctggaatatttc |
| | | | ccgtcgcaaatgctaagaacgggtaacaacttccagttcagctacgagtt |
| | | | tgagaacgtacctttccatagcagctacgctcacagccaaagcctggacc |
| | | | gactaatgaatccactcatcgaccaatacttgtactatctctcTaGAact |
| | | | attAACGGTTCTGGACAGAATCAAcaaacgctaaaattcagtgtggccgg |
| | | | acccagcaacatggctgtccagggaagaaactacatacctggacccagct |
| | | | accgacaacaacgtgtctcaaccactgtgactcaaaacaacaacagcgaa |
| | | | tttgcttggcctggagcttcttcttgggctctcaatggacgtaatagctt |
| | | | gatgaatcctggacctgctatggccagccacaaagaaggagaggaccgtt |
| | | | tctttcctttgtctggatctttaatttttggcaaacaaggTacCggCaga |
| | | | gacaacgtggatgcggacaaagtcatgataaccaacgaagaagaaattaa |
| | | | aactactaacccggtagcaacggagtcctatggacaagtggccacaaacc |
| | | | accagagtGCCCAAACAGCTCGTCCAAACGAGTACGCACAAGCACAAacc |
| | | | ggttgggttcaaaaccaaggaatacttccgggtatggtttggcaggacag |
| | | | agatgtgtacctgcaaggacccatttgggccaaaattcctcacacggacg |
| | | | gcaactttcacccttctccgctgatgggagggtttggaatgaagcacccg |
| | | | cctcctcagatcctcatcaaaaacacacctgtacctgcggatcctccaac |
| | | | ggccttcaacaaggacaagctgaactctttcatcacccagtattctactg |
| | | | gccaagtcagcgtggagatcgagtgggagctgcagaaggaaaacagcaag |
| | | | cgctggaacccggagatccagtacacttccaactattacaagtctaataa |
| | | | tgttgaatttgctgttaatactgaaggtgtatatagtgaaccccgcccca |
| | | | ttggcaccagatacctgactcgtaatctg |
| 162 | DNA | Adeno- | atggctgccgatggttatcttccagattggctcgaggacaaccttagtga |
| | | Associated | aggaattcgcgagtggtgggctttgaaacctggagcccctcaacccaagg |
| | | Virus 9 | caaatcaacaacatcaagacaacgctcgaggtcttgtgcttccgggttac |
| | | comprising | aaataccttggacccggcaacggactcgacaagggggagccggtcaacgc |
| | | SEQ | agcagacgcggcggccctcgagcacgacaaggcctacgaccagcagctca |
| | | ID NO: 15 | aggccggagacaacccgtacctcaagtacaaccacgccgacgccgagttc |
| | | | caggagcggctcaaagaagatacgtcttttgggggcaacctcgggcgagc |
| | | | agtcttccaggccaaaaagaggcttcttgaacctcttggtctggttgagg |
| | | | aagcggctaagacggctcctggaaagaagaggcctgtagagcagtctcct |
| | | | caggaaccggactcctccgcgggtattggcaaatcgggtgcacagcccgc |
| | | | taaaaagagactcaatttcggtcagactggcgacacagagtcagtcccag |
| | | | accctcaaccaatcggagaacctcccgcagccccctcaggtgtgggatct |
| | | | cttacaatggcttcaggtggtggcgcaccagtggcagacaataacgaagg |
| | | | tgccgatggagtgggtagttcctcgggaaattggcattgcgattcccaat |
| | | | ggctgggggacagagtcatcaccaccagcacccgaacctgggccctgccc |
| | | | acctacaacaatcacctctacaagcaaatctccaacagcacatctggagg |
| | | | atcttcaaatgacaacgcctacttcggctacagcaccccctgggggtatt |
| | | | ttgacttcaacagattccactgccacttctcaccacgtgactggcagcga |
| | | | ctcatcaacaacaactggggattccggcctaagcgactcaacttcaagct |
| | | | cttcaacattcaggtcaaagaggttacggacaacaatggagtcaagacca |
| | | | tcgccaataaccttaccagcacggtccaggtcttcacggactcagactat |
| | | | cagctcccgtacgtgctcgggtcggctcacgagggctgcctcccgccgtt |
| | | | cccagggacgttttcatgattcctcagtacgggtatctgacgcttaatga |
| | | | tggaagccaggccgtgggtcgttcgtccttttactgcctggaatatttcc |
| | | | cgtcgcaaatgctaagaacgggtaacaacttccagttcagctacgagttt |
| | | | gagaacgtacctttccatagcagctacgctcacagccaaagcctggaccg |
| | | | actaatgaatccactcatcgaccaatacttgtactatctctcTaGAacta |
| | | | ttAACGGTTCTGGACAGAATCAAcaaacgctaaaattcagtgtggccgga |
| | | | cccagcaacatggctgtccagggaagaaactacatacctggacccagcta |
| | | | ccgacaacaacgtgtctcaaccactgtgactcaaaacaacaacagcgaat |
| | | | ttgcttggcctggagcttcttcttgggctctcaatggacgtaatagcttg |
| | | | atgaatcctggacctgctatggccagccacaaagaaggagaggaccgttt |
| | | | ctttcctttgtctggatctttaatttttggcaaacaaggTacCggCagag |
| | | | acaacgtggatgcggacaaagtcatgataaccaacgaagaagaaattaaa |
| | | | actactaacccggtagcaacggagtcctatggacaagtggccacaaacca |
| | | | ccagagtGCACAAACAGCGCGTCCTAACGAGTACGCGCAAGCGCAGaccg |
| | | | gttgggttcaaaaccaaggaatacttccgggtatggtttggcaggacaga |
| | | | gatgtgtacctgcaaggacccatttgggccaaaattcctcacacggacgg |
| | | | caactttcacccttctccgctgatgggagggtttggaatgaagcacccgc |
| | | | ctcctcagatcctcatcaaaaacacacctgtacctgcggatcctccaacg |
| | | | gccttcaacaaggacaagctgaactctttcatcacccagtattctactgg |
| | | | ccaagtcagcgtggagatcgagtgggagctgcagaaggaaaacagcaagc |
| | | | gctggaacccggagatccagtacacttccaactattacaagtctaataat |
| | | | gttgaatttgctgttaatactgaaggtgtatatagtgaaccccgccccat |
| | | | tggcaccagatacctgactcgtaatctg |
| 163 | DNA | Adeno- | atggctgccgatggttatcttccagattggctcgaggacaaccttagtga |
| | | Associated | aggaattcgcgagtggtgggctttgaaacctggagcccctcaacccaagg |
| | | Virus 9 | caaatcaacaacatcaagacaacgctcgaggtcttgtgcttccgggttac |
| | | comprising | aaataccttggacccggcaacggactcgacaagggggagccggtcaacgc |
| | | SEQ | agcagacgcggcggccctcgagcacgacaaggcctacgaccagcagctca |
| | | ID NO: 15 | aggccggagacaacccgtacctcaagtacaaccacgccgacgccgagttc |
| | | | caggagcggctcaaagaagatacgtcttttgggggcaacctcgggcgagc |
| | | | agtcttccaggccaaaaagaggcttcttgaacctcttggtctggttgagg |
| | | | aagcggctaagacggctcctggaaagaagaggcctgtagagcagtctcct |
| | | | caggaaccggactcctccgcgggtattggcaaatcgggtgcacagcccgc |
| | | | taaaaagagactcaatttcggtcagactggcgacacagagtcagtcccag |
| | | | accctcaaccaatcggagaacctcccgcagccccctcaggtgtgggatct |
| | | | cttacaatggcttcaggtggtggcgcaccagtggcagacaataacgaagg |
| | | | tgccgatggagtgggtagttcctcgggaaattggcattgcgattcccaat |
| | | | ggctgggggacagagtcatcaccaccagcacccgaacctgggccctgccc |
| | | | acctacaacaatcacctctacaagcaaatctccaacagcacatctggagg |
| | | | atcttcaaatgacaacgcctacttcggctacagcaccccctgggggtatt |
| | | | ttgacttcaacagattccactgccacttctcaccacgtgactggcagcga |
| | | | ctcatcaacaacaactggggattccggcctaagcgactcaacttcaagct |
| | | | cttcaacattcaggtcaaagaggttacggacaacaatggagtcaagacca |
| | | | tcgccaataaccttaccagcacggtccaggtcttcacggactcagactat |
| | | | cagctcccgtacgtgctcgggtcggctcacgagggctgcctcccgccgtt |
| | | | cccagcggacgttttcatgattcctcagtacgggtatctgacgcttaatg |
| | | | atggaagccaggccgtgggtcgttcgtccttttactgcctggaatatttc |
| | | | ccgtcgcaaatgctaagaacgggtaacaacttccagttcagctacgagtt |
| | | | tgagaacgtacctttccatagcagctacgctcacagccaaagcctggacc |
| | | | gactaatgaatccactcatcgaccaatacttgtactatctctcTaGAact |
| | | | attAACGGTTCTGGACAGAATCAAcaaacgctaaaattcagtgtggccgg |
| | | | acccagcaacatggctgtccagggaagaaactacatacctggacccagct |
| | | | accgacaacaacgtgtctcaaccactgtgactcaaaacaacaacagcgaa |
| | | | tttgcttggcctggagcttcttcttgggctctcaatggacgtaatagctt |
| | | | gatgaatcctggacctgctatggccagccacaaagaaggagaggaccgtt |
| | | | tctttcctttgtctggatctttaatttttggcaaacaaggTacCggCaga |
| | | | gacaacgtggatgcggacaaagtcatgataaccaacgaagaagaaattaa |
| | | | aactactaacccggtagcaacggagtcctatggacaagtggccacaaacc |
| | | | accagagtGCTCAAACTGCCCGTCCTAATGAATACGCCCAAGCACAAacc |
| | | | ggttgggttcaaaaccaaggaatacttccgggtatggtttggcaggacag |
| | | | agatgtgtacctgcaaggacccatttgggccaaaattcctcacacggacg |
| | | | gcaactttcacccttctccgctgatgggagggtttggaatgaagcacccg |
| | | | cctcctcagatcctcatcaaaaacacacctgtacctgcggatcctccaac |
| | | | ggccttcaacaaggacaagctgaactctttcatcacccagtattctactg |
| | | | gccaagtcagcgtggagatcgagtgggagctgcagaaggaaaacagcaag |
| | | | cgctggaacccggagatccagtacacttccaactattacaagtctaataa |
| | | | tgttgaatttgctgttaatactgaaggtgtatatagtgaaccccgcccca |
| | | | ttggcaccagatacctgactcgtaatctg |
| 164 | DNA | Adeno- | atggctgccgatggttatcttccagattggctcgaggacaaccttagtga |
| | | Associated | aggaattcgcgagtggtgggctttgaaacctggagcccctcaacccaagg |
| | | Virus 9 | caaatcaacaacatcaagacaacgctcgaggtcttgtgcttccgggttac |
| | | comprising | aaataccttggacccggcaacggactcgacaagggggagccggtcaacgc |
| | | SEQ | agcagacgcggcggccctcgagcacgacaaggcctacgaccagcagctca |
| | | ID NO: 15 | aggccggagacaacccgtacctcaagtacaaccacgccgacgccgagttc |
| | | | caggagcggctcaaagaagatacgtcttttgggggcaacctcgggcgagc |
| | | | agtcttccaggccaaaaagaggcttcttgaacctcttggtctggttgagg |
| | | | aagcggctaagacggctcctggaaagaagaggcctgtagagcagtctcct |
| | | | caggaaccggactcctccgcgggtattggcaaatcgggtgcacagcccgc |
| | | | taaaaagagactcaatttcggtcagactggcgacacagagtcagtcccag |
| | | | accctcaaccaatcggagaacctcccgcagccccctcaggtgtgggatct |
| | | | cttacaatggcttcaggtggtggcgcaccagtggcagacaataacgaagg |
| | | | tgccgatggagtgggtagttcctcgggaaattggcattgcgattcccaat |
| | | | ggctgggggacagagtcatcaccaccagcacccgaacctgggccctgccc |
| | | | acctacaacaatcacctctacaagcaaatctccaacagcacatctggagg |
| | | | atcttcaaatgacaacgcctacttcggctacagcaccccctgggggtatt |
| | | | ttgacttcaacagattccactgccacttctcaccacgtgactggcagcga |
| | | | ctcatcaacaacaactggggattccggcctaagcgactcaacttcaagct |
| | | | cttcaacattcaggtcaaagaggttacggacaacaatggagtcaagacca |
| | | | tcgccaataaccttaccagcacggtccaggtcttcacggactcagactat |
| | | | cagctcccgtacgtgctcgggtcggctcacgagggctgcctcccgccgtt |
| | | | cccagcggacgttttcatgattctcagtacgggtatctgacgcttaatga |
| | | | tggaagccaggccgtgggtcgttcgtccttttactgcctggaatatttcc |
| | | | cgtcgcaaatgctaagaacgggtaacaacttccagttcagctacgagttt |
| | | | gagaacgtacctttccatagcagctacgctcacagccaaagcctggaccg |
| | | | actaatgaatccactcatcgaccaatacttgtactatctctcTaGAacta |
| | | | ttAACGGTTCTGGACAGAATCAAcaaacgctaaaattcagtgtggccgga |
| | | | cccagcaacatggctgtccagggaagaaactacatacctggacccagcta |
| | | | ccgacaacaacgtgtctcaaccactgtgactcaaaacaacaacagcgaat |
| | | | ttgcttggcctggagcttcttcttgggctctcaatggacgtaatagcttg |
| | | | atgaatcctggacctgctatggccagccacaaagaaggagaggaccgttt |
| | | | ctttcctttgtctggatctttaatttttggcaaacaaggTacCggCagag |
| | | | acaacgtggatgcggacaaagtcatgataaccaacgaagaagaaattaaa |
| | | | actactaacccggtagcaacggagtcctatggacaagtggccacaaacca |
| | | | ccagagtGCACAGACAGCGAGACCAAACGAGTATGCGCAGGCTCAGaccg |
| | | | gttgggttcaaaaccaaggaatacttccgggtatggtttggcaggacaga |
| | | | gatgtgtacctgcaaggacccatttgggccaaaattcctcacacggacgg |
| | | | caactttcacccttctccgctgatgggagggtttggaatgaagcacccgc |
| | | | ctcctcagatcctcatcaaaaacacacctgtacctgcggatcctccaacg |
| | | | gccttcaacaaggacaagctgaactctttcatcacccagtattctactgg |
| | | | ccaagtcagcgtggagatcgagtgggagctgcagaaggaaaacagcaagc |
| | | | gctggaacccggagatccagtacacttccaactattacaagtctaataat |
| | | | gttgaatttgctgttaatactgaaggtgtatatagtgaaccccgccccat |
| | | | tggcaccagatacctgactcgtaatctg |
| 165 | DNA | Adeno- | atggctgccgatggttatcttccagattggctcgaggacaaccttagtga |
| | | Associated | aggaattcgcgagtggtgggctttgaaacctggagcccctcaacccaagg |
| | | Virus 9 | caaatcaacaacatcaagacaacgctcgaggtcttgtgcttccgggttac |
| | | comprising | aaataccttggacccggcaacggactcgacaagggggagccggtcaacgc |
| | | SEQ | agcagacgcggcggccctcgagcacgacaaggcctacgaccagcagctca |
| | | ID NO: 15 | aggccggagacaacccgtacctcaagtacaaccacgccgacgccgagttc |
| | | | caggagcggctcaaagaagatacgtcttttgggggcaacctcgggcgagc |
| | | | agtcttccaggccaaaaagaggcttcttgaacctcttggtctggttgagg |
| | | | aagcggctaagacggctcctggaaagaagaggcctgtagagcagtctcct |
| | | | caggaaccggactcctccgcgggtattggcaaatcgggtgcacagcccgc |
| | | | taaaaagagactcaatttcggtcagactggcgacacagagtcagtcccag |
| | | | accctcaaccaatcggagaacctcccgcagccccctcaggtgtgggatct |
| | | | cttacaatggcttcaggtggtggcgcaccagtggcagacaataacgaagg |
| | | | tgccgatggagtgggtagttcctcgggaaattggcattgcgattcccaat |
| | | | ggctgggggacagagtcatcaccaccagcacccgaacctgggccctgccc |
| | | | acctacaacaatcacctctacaagcaaatctccaacagcacatctggagg |
| | | | atcttcaaatgacaacgcctacttcggctacagcaccccctgggggtatt |
| | | | ttgacttcaacagattccactgccacttctcaccacgtgactggcagcga |
| | | | ctcatcaacaacaactggggattccggcctaagcgactcaacttcaagct |
| | | | cttcaacattcaggtcaaagaggttacggacaacaatggagtcaagacca |
| | | | tcgccaataaccttaccagcacggtccaggtcttcacggactcagactat |
| | | | cagctcccgtacgtgctcgggtcggctcacgagggctgcctcccgccgtt |
| | | | cccagcggacgttttcatgattcctcagtacgggtatctgacgcttaatg |
| | | | atggaagccaggccgtgggtcgttcgtccttttactgcctggaatatttc |
| | | | ccgtcgcaaatgctaagaacgggtaacaacttccagttcagctacgagtt |
| | | | tgagaacgtacctttccatagcagctacgctcacagccaaagcctggacc |
| | | | gactaatgaatccactcatcgaccaatacttgtactatctctcTaGAact |
| | | | attAACGGTTCTGGACAGAATCAAcaaacgctaaaattcagtgtggccgg |
| | | | acccagcaacatggctgtccagggaagaaactacatacctggacccagct |
| | | | accgacaacaacgtgtctcaaccactgtgactcaaaacaacaacagcgaa |
| | | | tttgcttggcctggagcttcttcttgggctctcaatggacgtaatagctt |
| | | | gatgaatcctggacctgctatggccagccacaaagaaggagaggaccgtt |
| | | | tctttcctttgtctggatctttaatttttggcaaacaaggTacCggCaga |
| | | | gacaacgtggatgcggacaaagtcatgataaccaacgaagaagaaattaa |
| | | | aactactaacccggtagcaacggagtcctatggacaagtggccacaaacc |
| | | | accagagtGCGCAGACGGCCCGACCTAACGAGTACGCCCAGGCACAAacc |
| | | | ggttgggttcaaaaccaaggaatacttccgggtatggtttggcaggacag |
| | | | agatgtgtacctgcaaggacccatttgggccaaaattcctcacacggacg |
| | | | gcaactttcacccttctccgctgatgggagggtttggaatgaagcacccg |
| | | | cctcctcagatcctcatcaaaaacacacctgtacctgcggatcctccaac |
| | | | ggccttcaacaaggacaagctgaactctttcatcacccagtattctactg |
| | | | gccaagtcagcgtggagatcgagtgggagctgcagaaggaaaacagcaag |
| | | | cgctggaacccggagatccagtacacttccaactattacaagtctaataa |
| | | | tgttgaatttgctgttaatactgaaggtgtatatagtgaaccccgcccca |
| | | | ttggcaccagatacctgactcgtaatctg |
| 166 | DNA | Adeno- | atggctgccgatggttatcttccagattggctcgaggacaaccttagtga |
| | | Associated | aggaattcgcgagtggtgggctttgaaacctggagcccctcaacccaagg |
| | | Virus 9 | caaatcaacaacatcaagacaacgctcgaggtcttgtgcttccgggttac |
| | | comprising | aaataccttggacccggcaacggactcgacaagggggagccggtcaacgc |
| | | SEQ | agcagacgcggcggccctcgagcacgacaaggcctacgaccagcagctca |
| | | ID NO: 15 | aggrcggagacaacccgtacctcaagtacaaccacgccgacgccgagttc |
| | | | caggagcggctcaaagaagatacgtcttttgggggcaacctcgggcgagc |
| | | | agtcttccaggccaaaaagaggcttcttgaacctcttggtctggttgagg |
| | | | aagcggctaagacggctcctggaaagaagaggcctgtagagcagtctcct |
| | | | caggaaccggactcctccgcgggtattggcaaatcgggtgcacagcccgc |
| | | | taaaaagagactcaatttcggtcagactggcgacacagagtcagtcccag |
| | | | accctcaaccaatcggagaacctcccgcagccccctcaggtgtgggatct |
| | | | cttacaatggcttcaggtggtggcgcaccagtggcagacaataacgaagg |
| | | | tgccgatggagtgggtagttcctcgggaaattggcattgcgattcccaat |
| | | | ggctgggggacagagtcatcaccaccagcacccgaacctgggccctgccc |
| | | | acctacaacaatcacctctacaagcaaatctccaacagcacatctggagg |
| | | | atcttcaaatgacaacgcctacttcggctacagcaccccctgggggtatt |
| | | | ttgacttcaacagattccactgccacttctcaccacgtgactggcagcga |
| | | | ctcatcaacaacaactggggattccggcctaagcgactcaacttcaagct |
| | | | cttcaacattcaggtcaaagaggttacggacaacaatggagtcaagacca |
| | | | tcgccaataaccttaccagcacggtccaggtcttcacggactcagactat |
| | | | cagctcccgtacgtgctcgggtcggctcacgagggctgcctcccgccgtt |
| | | | cccagcggacgttttcatgattcctcagtacgggtatctgacgcttaatg |
| | | | atggaagccaggccgtgggtcgttcgtccttttactgcctggaatatttc |
| | | | ccgtcgcaaatgctaagaacgggtaacaacttccagttcagctacgagtt |
| | | | tgagaacgtacctttccatagcagctacgctcacagccaaagcctggacc |
| | | | gactaatgaatccactcatcgaccaatacttgtactatctctcTaGAact |
| | | | attAACGGTTCTGGACAGAATCAAcaaacgctaaaattcagtgtggccgg |
| | | | acccagcaacatggctgtccagggaagaaactacatacctggacccagct |
| | | | accgacaacaacgtgtctcaaccactgtgactcaaaacaacaacagcgaa |
| | | | tttgcttggcctggagcttcttcttgggctctcaatggacgtaatagctt |
| | | | gatgaatcctggacctgctatggccagccacaaagaaggagaggaccgtt |
| | | | tctttcctttgtctggatctttaatttttggcaaacaaggTacCggCaga |
| | | | gacaacgtggatgcggacaaagtcatgataaccaacgaagaagaaattaa |
| | | | aactactaacccggtagcaacggagtcctatggacaagtggccacaaacc |
| | | | accagagtGCGCAAACTGCTAGACCTAATGAGTACGCACAAGCGCAGacc |
| | | | ggttgggttcaaaaccaaggaatacttccgggtatggtttggcaggacag |
| | | | agatgtgtacctgcaaggacccatttgggccaaaattcctcacacggacg |
| | | | gcaactttcacccttctccgctgatgggagggtttggaatgaagcacccg |
| | | | cctcctcagatcctcatcaaaaacacacctgtacctgcggatcctccaac |
| | | | ggccttcaacaaggacaagctgaactctttcatcacccagtattctactg |
| | | | gccaagtcagcgtggagatcgagtgggagctgcagaaggaaaacagcaag |
| | | | cgctggaacccggagatccagtacacttccaactattacaagtctaataa |
| | | | tgttgaatttgctgttaatactgaaggtgtatatagtgaaccccgcccca |
| | | | ttggcaccagatacctgactcgtaatctg |
| 167 | DNA | Adeno- | atggctgccgatggttatcttccagattggctcgaggacaaccttagtga |
| | | Associated | aggaattcgcgagtggtgggctttgaaacctggagcccctcaacccaagg |
| | | Virus 9 | caaatcaacaacatcaagacaacgctcgaggtcttgtgcttccgggttac |
| | | comprising | aaataccttggacccggcaacggactcgacaagggggagccggtcaacgc |
| | | SEQ | agcagacgcggcggccctcgagcacgacaaggcctacgaccagcagctca |
| | | ID NO: 15 | aggccggagacaacccgtacctcaagtacaaccacgccgacgccgagttc |
| | | | caggagcggctcaaagaagatacgtcttttgggggcaacctcgggcgagc |
| | | | agtcttccaggccaaaaagaggcttcttgaacctcttggtctggttgagg |
| | | | aagcggctaagacggctcctggaaagaagaggcctgtagagcagtctcct |
| | | | caggaaccggactcctccgcgggtattggcaaatcgggtgcacagcccgc |
| | | | taaaaagagactcaatttcggtcagactggcgacacagagtcagtcccag |
| | | | accctcaaccaatcggagaacctcccgcagccccctaggtgtgggatctc |
| | | | ttacaatggcttcaggtggtggcgcaccagtggcagacaataacgaaggt |
| | | | gccgatggagtgggtagttcctcgggaaattggcattgcgattcccaatg |
| | | | gctgggggacagagtcatcaccaccagcacccgaacctgggccctgccca |
| | | | cctacaacaatcacctctacaagcaaatctccaacagcacatctggagga |
| | | | tcttcaaatgacaacgcctacttcggctacagcaccccctgggggtattt |
| | | | tgacttcaacagattccactgccacttctcaccacgtgactggcagcgac |
| | | | tcatcaacaacaactggggattccggcctaagcgactcaacttcaagctc |
| | | | ttcaacattcaggtcaaagaggttacggacaacaatggagtcaagaccat |
| | | | cgccaataaccttaccagcacggtccaggtcttcacggactcagactatc |
| | | | agctcccgtacgtgctcgggtcggctcacgagggctgcctcccgcgttcc |
| | | | cagcggacgttttcatgattcctcagtacgggtatctgacgcttaatgat |
| | | | ggaagccaggccgtgggtcgttcgtccttttactgcctggaatatttccc |
| | | | gtcgcaaatgctaagaacgggtaacaacttccagttcagctacgagtttg |
| | | | agaacgtacctttccatagcagctacgctcacagccaaagcctggaccga |
| | | | ctaatgaatccactcatcgaccaatacttgtactatctctcTaGAactat |
| | | | tAACGGTTCTGGACAGAATCAAcaaacgctaaaattcagtgtggccggac |
| | | | ccagcaacatggctgtccagggaagaaactacatacctggacccagctac |
| | | | cgacaacaacgtgtctcaaccactgtgactcaaaacaacaacagcgaatt |
| | | | tgcttggcctggagcttcttcttgggctctcaatggacgtaatagcttga |
| | | | tgaatcctggacctgctatggccagccacaaagaaggagaggaccgtttc |
| | | | tttcctttgtctggatctttaatttttggcaaacaaggTacCggCagaga |
| | | | caacgtggatgcggacaaagtcatgataaccaacgaagaagaaattaaaa |
| | | | ctactaacccggtagcaacggagtcctatggacaagtggccacaaaccac |
| | | | cagagtGCACAAACCGCACGTCCGAATGAATATGCTCAAGCGCAGaccgg |
| | | | ttgggttcaaaaccaaggaatacttccgggtatggtttggcaggacagag |
| | | | atgtgtacctgcaaggacccatttgggccaaaattcctcacacggacggc |
| | | | aactttcacccttctccgctgatgggagggtttggaatgaagcacccgcc |
| | | | tcctcagatcctcatcaaaaacacacctgtacctgcggatcctccaacgg |
| | | | ccttcaacaaggacaagctgaactctttcatcacccagtattctactggc |
| | | | caagtcagcgtggagatcgagtgggagctgcagaaggaaaacagcaagcg |
| | | | ctggaacccggagatccagtacacttccaactattacaagtctaataatg |
| | | | ttgaatttgctgttaatactgaaggtgtatatagtgaaccccgccccatt |
| | | | ggcaccagatacctgactcgtaatctg |
| 168 | DNA | Adeno- | atggctgccgatggttatcttccagattggctcgaggacaaccttagtga |
| | | Associated | aggaattcgcgagtggtgggctttgaaacctggagcccctcaacccaagg |
| | | Virus 9 | caaatcaacaacatcaagacaacgctcgaggtcttgtgcttccgggttac |
| | | comprising | aaataccttggacccggcaacggactcgacaagggggagccggtcaacgc |
| | | SEQ | agcagacgcggcggccctcgagcacgacaaggcctacgaccagcagctca |
| | | ID NO: 15 | aggccggagacaacccgtacctcaagtacaaccacgccgacgccgagttc |
| | | | caggagcggctcaaagaagatacgtcttttgggggcaacctcgggcgagc |
| | | | agtcttccaggccaaaaagaggcttcttgaacctcttggtctggttgagg |
| | | | aagcggctaagacggctcctggaaagaagaggcctgtagagcagtctcct |
| | | | caggaaccggactcctccgcgggtattggcaaatcgggtgcacagcccgc |
| | | | taaaaagagactcaatttcggtcagactggcgacacagagtcagtcccag |
| | | | accctcaaccaatcggagaacctcccgcagccccctcaggtgtgggatct |
| | | | cttacaatggcttcaggtggtggcgcaccagtggcagacaataacgaagg |
| | | | tgccgatggagtgggtagttcctcgggaaattggcattgcgattcccaat |
| | | | ggctgggggacagagtcatcaccaccagcacccgaacctgggccctgccc |
| | | | acctacaacaatcacctctacaagcaaatctccaacagcacatctggagg |
| | | | atcttcaaatgacaacgcctacttcggctacagcaccccctgggggtatt |
| | | | ttgacttcaacagattccactgccacttctcaccacgtgactggcagcga |
| | | | ctcatcaacaacaactggggattccggcctaagcgactcaacttcaagct |
| | | | cttcaacattcaggtcaaagaggttacggacaacaatggagtcaagacca |
| | | | tcgccaataaccttaccagcacggtccaggtcttcacggactcagactat |
| | | | cagctcccgtacgtgctcgggtcggctcacgagggctgcctcccgccgtt |
| | | | cccagcggacgttttcatgattcctcagtacgggtatctgacgcttaatg |
| | | | atggaagccaggccgtgggtcgttcgtccttttactgcctggaatatttc |
| | | | ccgtcgcaaatgctaagaacgggtaacaacttccagttcagctacgagtt |
| | | | tgagaacgtacctttccatagcagctacgctcacagccaaagcctggacc |
| | | | gactaatgaatccactcatcgaccaatacttgtactatctctcTaGAact |
| | | | attAACGGTTCTGGACAGAATCAAcaaacgctaaaattcagtgtggccgg |
| | | | acccagcaacatggctgtccagggaagaaactacatacctggacccagct |
| | | | accgacaacaacgtgtctcaaccactgtgactcaaaacaacaacagcgaa |
| | | | tttgcttggcctggagcttcttcttgggctctcaatggacgtaatagctt |
| | | | gatgaatcctggacctgctatggccagccacaaagaaggagaggaccgtt |
| | | | tctttcctttgtctggatctttaatttttggcaaacaaggTacCggCaga |
| | | | gacaacgtggatgcggacaaagtcatgataaccaacgaagaagaaattaa |
| | | | aactactaacccggtagcaacggagtcctatggacaagtggccacaaacc |
| | | | accagagtGCCCAGACCGCACGACCGAACGAATATGCGCAGGCACAAacc |
| | | | ggttgggttcaaaaccaaggaatacttccgggtatggtttggcaggacag |
| | | | agatgtgtacctgcaaggacccatttgggccaaaattcctcacacggacg |
| | | | gcaactttcacccttctccgctgatgggagggtttggaatgaagcacccg |
| | | | cctcctcagatcctcatcaaaaacacacctgtacctgcggatcctccaac |
| | | | ggccttcaacaaggacaagctgaactctttcatcacccagtattctactg |
| | | | gccaagtcagcgtggagatcgagtgggagctgcagaaggaaaacagcaag |
| | | | cgctggaacccggagatccagtacacttccaactattacaagtctaataa |
| | | | tgttgaatttgctgttaatactgaaggtgtatatagtgaaccccgcccca |
| | | | ttggcaccagatacctgactcgtaatctg |
| 169 | DNA | Adeno- | atggctgccgatggttatcttccagattggctcgaggacaaccttagtga |
| | | Associated | aggaattcgcgagtggtgggctttgaaacctggagcccctcaacccaagg |
| | | Virus 9 | caaatcaacaacatcaagacaacgctcgaggtcttgtgcttccgggttac |
| | | comprising | aaataccttggacccggcaacggactcgacaagggggagccggtcaacgc |
| | | SEQ | agcagacgcggcggccctcgagcacgacaaggcctacgaccagcagctca |
| | | ID NO: 15 | aggccggagacaacccgtacctcaagtacaaccacgccgacgccgagttc |
| | | | caggagcggctcaaagaagatacgtcttttgggggcaacctcgggcgagc |
| | | | agtcttccaggccaaaaagaggcttcttgaacctcttggtctggttgagg |
| | | | aagcggctaagacggctcctggaaagaagaggcctgtagagcagtctcct |
| | | | caggaaccggactcctccgcgggtattggcaaatcgggtgcacagcccgc |
| | | | taaaaagagactcaatttcggtcagactggcgacacagagtcagtcccag |
| | | | accctcaaccaatcggagaacctcccgcagccccctcaggtgtgggatct |
| | | | cttacaatggcttcaggtggtggcgcaccagtggcagacaataacgaagg |
| | | | tgccgatggagtgggtagttcctcgggaaattggcattgcgattcccaat |
| | | | ggctgggggacagagtcatcaccaccagcacccgaacctgggccctgccc |
| | | | acctacaacaatcacctctacaagcaaatctccaacagcacatctggagg |
| | | | atcttcaaatgacaacgcctacttcggctacagcaccccctgggggtatt |
| | | | ttgacttcaacagattccactgccacttctcaccacgtgactggcagcga |
| | | | ctcatcaacaacaactggggattccggcctaagcgactcaacttcaagct |
| | | | cttcaacattcaggtcaaagaggttacggacaacaatggagtcaagacca |
| | | | tcgccaataaccttaccagcacggtccaggtcttcacggactcagactat |
| | | | cagctcccgtacgtgctcgggtcggctcacgagggctgcctcccgccgtt |
| | | | cccagcggacgttttcatgattcctcagtacgggtatctgacgcttaatg |
| | | | atggaagccaggccgtgggtcgttcgtccttttactgcctggaatatttc |
| | | | ccgtcgcaaatgctaagaacgggtaacaacttccagttcagctacgagtt |
| | | | tgagaacgtacctttccatagcagctacgctcacagccaaagcctggacc |
| | | | gactaatgaatccactcatcgaccaatacttgtactatctctcTaGAact |
| | | | attAACGGTTCTGGACAGAATCAAcaaacgctaaaattcagtgtggccgg |
| | | | acccagcaacatggctgtccagggaagaaactacatacctggacccagct |
| | | | accgacaacaacgtgtctcaaccactgtgactcaaaacaacaacagcgaa |
| | | | tttgcttggcctggagcttcttcttgggctctcaatggacgtaatagctt |
| | | | gatgaatcctggacctgctatggccagccacaaagaaggagaggaccgtt |
| | | | tctttcctttgtctggatctttaatttttggcaaacaaggTacCggCaga |
| | | | gacaacgtggatgcggacaaagtcatgataaccaacgaagaagaaattaa |
| | | | aactactaacccggtagcaacggagtcctatggacaagtggccacaaacc |
| | | | accagagtGCGCAGACTGCAAGGCCCAATGAATATGCCCAGGCGCAGacc |
| | | | ggttgggttcaaaaccaaggaatacttccgggtatggtttggcaggacag |
| | | | agatgtgtacctgcaaggacccatttgggccaaaattcctcacacggacg |
| | | | gcaactttcacccttctccgctgatgggagggtttggaatgaagcacccg |
| | | | cctcctcagatcctcatcaaaaacacacctgtacctgcggatcctccaac |
| | | | ggccttcaacaaggacaagctgaactctttcatcacccagtattctactg |
| | | | gccaagtcagcgtggagatcgagtgggagctgcagaaggaaaacagcaag |
| | | | cgctggaacccggagatccagtacacttccaactattacaagtctaataa |
| | | | tgttgaatttgctgttaatactgaaggtgtatatagtgaaccccgcccca |
| | | | ttggcaccagatacctgactcgtaatctg |
| 170 | DNA | Adeno- | atggctgccgatggttatcttccagattggctcgaggacaaccttagtga |
| | | Associated | aggaattcgcgagtggtgggctttgaaacctggagcccctcaacccaagg |
| | | Virus 9 | caaatcaacaacatcaagacaacgctcgaggtcttgtgcttccgggttac |
| | | comprising | aaataccttggacccggcaacggactcgacaagggggagccggtcaacgc |
| | | SEQ | agcagacgcggcggccctcgagcacgacaaggcctacgaccagcagctca |
| | | ID NO: 15 | aggccggagacaacccgtacctcaagtacaaccacgccgacgccgagttc |
| | | | caggagcggctcaaagaagatacgtcttttgggggcaacctcgggcgagc |
| | | | agtcttccaggccaaaaagaggcttcttgaacctcttggtctggttgagg |
| | | | aagcggctaagacggctcctggaaagaagaggcctgtagagcagtctcct |
| | | | caggaaccggactcctccgcgggtattggcaaatcgggtgcacagcccgc |
| | | | taaaaagagactcaatttcggtcagactggcgacacagagtcagtcccag |
| | | | accctcaaccaatcggagaacctcccgcagccccctcaggtgtgggatct |
| | | | cttacaatggcttcaggtggtggcgcaccagtggcagacaataacgaagg |
| | | | tgccgatggagtgggtagttcctcgggaaattggcattgcgattcccaat |
| | | | ggctgggggacagagtcatcaccaccagcacccgaacctgggccctgccc |
| | | | acctacaacaatcacctctacaagcaaatctccaacagcacatctggagg |
| | | | atcttcaaatgacaacgcctacttcggctacagcaccccctgggggtatt |
| | | | ttgacttcaacagattccactgccacttctcaccacgtgactggcagcga |
| | | | ctcatcaacaacaactggggattccggcctaagcgactcaacttcaagct |
| | | | cttcaacattcaggtcaaagaggttacggacaacaatggagtcaagacca |
| | | | tcgccaataaccttaccagcacggtccaggtcttcacggactcagactat |
| | | | cagctcccgtacgtgctcgggtcggctcacgagggctgcctcccgccgtt |
| | | | cccagcggacgttttcatgattcctcagtacgggtatctgacgcttaatg |
| | | | atggaagccaggccgtgggtcgttcgtccttttactgcctggaatatttc |
| | | | ccgtcgcaaatgctaagaacgggtaacaacttccagttcagctacgagtt |
| | | | tgagaacgtacctttccatagcagctacgctcacagccaaagcctggacc |
| | | | gactaatgaatccactcatcgaccaatacttgtactatctctcTaGAact |
| | | | attAACGGTTCTGGACAGAATCAAcaaacgctaaaattcagtgtggccgg |
| | | | acccagcaacatggctgtccagggaagaaactacatacctggacccagct |
| | | | accgacaacaacgtgtctcaaccactgtgactcaaaacaacaacagcgaa |
| | | | tttgcttggcctggagcttcttcttgggctctcaatggacgtaatagctt |
| | | | gatgaatcctggacctgctatggccagccacaaagaaggagaggaccgtt |
| | | | tctttcctttgtctggatctttaatttttggcaaacaaggTacCggCaga |
| | | | gacaacgtggatgcggacaaagtcatgataaccaacgaagaagaaattaa |
| | | | aactactaacccggtagcaacggagtcctatggacaagtggccacaaacc |
| | | | accagagtGCGCAGACCGCCCGGCCCAATGAATATGCCCAGGCACAAacc |
| | | | ggttgggttcaaaaccaaggaatacttccgggtatggtttggcaggacag |
| | | | agatgtgtacctgcaaggacccatttgggccaaaattcctcacacggacg |
| | | | gcaactttcacccttctccgctgatgggagggtttggaatgaagcacccg |
| | | | cctcctcagatcctcatcaaaaacacacctgtacctgcggatcctccaac |
| | | | ggccttcaacaaggacaagctgaactctttcatcacccagtattctactg |
| | | | gccaagtcagcgtggagatcgagtgggagctgcagaaggaaaacagcaag |
| | | | cgctggaacccggagatccagtacacttccaactattacaagtctaataa |
| | | | tgttgaatttgctgttaatactgaaggtgtatatagtgaaccccgcccca |
| | | | ttggcaccagatacctgactcgtaatctg |
| 171 | DNA | Adeno- | atggctgccgatggttatcttccagattggctcgaggacaaccttagtga |
| | | Associated | aggaattcgcgagtggtgggctttgaaacctggagcccctcaacccaagg |
| | | Virus 9 | caaatcaacaacatcaagacaacgctcgaggtcttgtgcttccgggttac |
| | | comprising | aaataccttggacccggcaacggactcgacaagggggagccggtcaacgc |
| | | SEQ | agcagacgcggcggccctcgagcacgacaaggcctacgaccagcagctca |
| | | ID NO: 16 | aggccggagacaacccgtacctcaagtacaaccacgccgacgccgagttc |
| | | | caggagcggctcaaagaagatacgtcttttgggggcaacctcgggcgagc |
| | | | agtcttccaggccaaaaagaggcttcttgaacctcttggtctggttgagg |
| | | | aagcggctaagacggctcctggaaagaagaggcctgtagagcagtctcct |
| | | | caggaaccggactcctccgcgggtattggcaaatcgggtgcacagcccgc |
| | | | taaaaagagactcaatttcggtcagactggcgacacagagtcagtcccag |
| | | | accctcaaccaatcggagaacctcccgcagccccctcaggtgtgggatct |
| | | | cttacaatggcttcaggtggtggcgcaccagtggcagacaataacgaagg |
| | | | tgccgatggagtgggtagttcctcgggaaattggcattgcgattcccaat |
| | | | ggctgggggacagagtcatcaccaccagcacccgaacctgggccctgccc |
| | | | acctacaacaatcacctctacaagcaaatctccaacagcacatctggagg |
| | | | atcttcaaatgacaacgcctacttcggctacagcaccccctgggggtatt |
| | | | ttgacttcaacagattccactgccacttctcaccacgtgactggcagcga |
| | | | ctcatcaacaacaactggggattccggcctaagcgactcaacttcaagct |
| | | | cttcaacattcaggtcaaagaggttacggacaacaatggagtcaagacca |
| | | | tcgccaataaccttaccagcacggtccaggtcttcacggactcagactat |
| | | | cagctcccgtacgtgctcgggtcggctcacgagggctgcctcccgccgtt |
| | | | cccagcggacgttttcatgattcctcagtacgggtatctgacgcttaatg |
| | | | atggaagccaggccgtgggtcgttcgtccttttactgcctggaatatttc |
| | | | ccgtcgcaaatgctaagaacgggtaacaacttccagttcagctacgagtt |
| | | | tgagaacgtacctttccatagcagctacgctcacagccaaagcctggacc |
| | | | gactaatgaatccactcatcgaccaatacttgtactatctctcTaGAact |
| | | | attAACGGTTCTGGACAGAATCAAcaaacgctaaaattcagtgtggccgg |
| | | | acccagcaacatggctgtccagggaagaaactacatacctggacccagct |
| | | | accgacaacaacgtgtctcaaccactgtgactcaaaacaacaacagcgaa |
| | | | tttgcttggcctggagcttcttcttgggctctcaatggacgtaatagctt |
| | | | gatgaatcctggacctgctatggccagccacaaagaaggagaggaccgtt |
| | | | tctttcctttgtctggatctttaatttttggcaaacaaggTacCggCaga |
| | | | gacaacgtggatgcggacaaagtcatgataaccaacgaagaagaaattaa |
| | | | aactactaacccggtagcaacggagtcctatggacaagtggccacaaacc |
| | | | accagagtGCTCAGACGAGGACACCAGTGGAATTCGCGCAAGCACAAacc |
| | | | ggttgggttcaaaaccaaggaatacttccgggtatggtttggcaggacag |
| | | | agatgtgtacctgcaaggacccatttgggccaaaattcctcacacggacg |
| | | | gcaactttcacccttctccgctgatgggagggtttggaatgaagcacccg |
| | | | cctcctcagatcctcatcaaaaacacacctgtacctgcggatcctccaac |
| | | | ggccttcaacaaggacaagctgaactctttcatcacccagtattctactg |
| | | | gccaagtcagcgtggagatcgagtgggagctgcagaaggaaaacagcaag |
| | | | cgctggaacccggagatccagtacacttccaactattacaagtctaataa |
| | | | tgttgaatttgctgttaatactgaaggtgtatatagtgaaccccgcccca |
| | | | ttggcaccagatacctgactcgtaatctg |
| 172 | DNA | Adeno- | atggctgccgatggttatcttccagattggctcgaggacaaccttagtga |
| | | Associated | aggaattcgcgagtggtgggctttgaaacctggagcccctcaacccaagg |
| | | Virus 9 | caaatcaacaacatcaagacaacgctcgaggtcttgtgcttccgggttac |
| | | comprising | aaataccttggacccggcaacggactcgacaagggggagccggtcaacgc |
| | | SEQ | agcagacgcggcggccctcgagcacgacaaggcctacgaccagcagctca |
| | | ID NO: 16 | aggccggagacaacccgtacctcaagtacaaccacgccgacgccgagttc |
| | | | caggagcggctcaaagaagatacgtcttttgggggcaacctcgggcgagc |
| | | | agtcttccaggccaaaaagaggcttcttgaacctcttggtctggttgagg |
| | | | aagcggctaagacggctcctggaaagaagaggcctgtagagcagtctcct |
| | | | caggaaccggactcctccgcgggtattggcaaatcgggtgcacagcccgc |
| | | | taaaaagagactcaatttcggtcagactggcgacacagagtcagtcccag |
| | | | accctcaaccaatcggagaacctcccgcagccccctcaggtgtgggatct |
| | | | cttacaatggcttcaggtggtggcgcaccagtggcagacaataacgaagg |
| | | | tgccgatggagtgggtagttcctcgggaaattggcattgcgattcccaat |
| | | | ggctgggggacagagtcatcaccaccagcacccgaacctgggccctgccc |
| | | | acctacaacaatcacctctacaagcaaatctccaacagcacatctggagg |
| | | | atcttcaaatgacaacgcctacttcggctacagcaccccctgggggtatt |
| | | | ttgacttcaacagattccactgccacttctcaccacgtgactggcagcga |
| | | | ctcatcaacaacaactggggattccggcctaagcgactcaacttcaagct |
| | | | cttcaacattcaggtcaaagaggttacggacaacaatggagtcaagacca |
| | | | tcgccaataaccttaccagcacggtccaggtcttcacggactcagactat |
| | | | cagctcccgtacgtgctcgggtcggctcacgagggctgcctcccgccgtt |
| | | | cccagcggacgttttcatgattcctcagtacgggtatctgacgcttaatg |
| | | | atggaagccaggccgtgggtcgttcgtccttttactgcctggaatatttc |
| | | | ccgtcgcaaatgctaagaacgggtaacaacttccagttcagctacgagtt |
| | | | tgagaacgtacctttccatagcagctacgctcacagccaaagcctggacc |
| | | | gactaatgaatccactcatcgaccaatacttgtactatctctcTaGAact |
| | | | attAACGGTTCTGGACAGAATCAAcaaacgctaaaattcagtgtggccgg |
| | | | acccagcaacatggctgtccagggaagaaactacatacctggacccagct |
| | | | accgacaacaacgtgtctcaaccactgtgactcaaaacaacaacagcgaa |
| | | | tttgcttggcctggagcttcttcttgggctctcaatggacgtaatagctt |
| | | | gatgaatcctggacctgctatggccagccacaaagaaggagaggaccgtt |
| | | | tctttcctttgtctggatctttaatttttggcaaacaaggTacCggCaga |
| | | | gacaacgtggatgcggacaaagtcatgataaccaacgaagaagaaattaa |
| | | | aactactaacccggtagcaacggagtcctatggacaagtggccacaaacc |
| | | | accagagtGCACAAACACGTACCCCTGTCGAATTTGCCCAAGCACAAacc |
| | | | ggttgggttcaaaaccaaggaatacttccgggtatggtttggcaggacag |
| | | | agatgtgtacctgcaaggacccatttgggccaaaattcctcacacggacg |
| | | | gcaactttcacccttctccgctgatgggagggtttggaatgaagcacccg |
| | | | cctcctcagatcctcatcaaaaacacacctgtacctgcggatcctccaac |
| | | | ggccttcaacaaggacaagctgaactctttcatcacccagtattctactg |
| | | | gccaagtcagcgtggagatcgagtgggagctgcagaaggaaaacagcaag |
| | | | cgctggaacccggagatccagtacacttccaactattacaagtctaataa |
| | | | tgttgaatttgctgttaatactgaaggtgtatatagtgaaccccgcccca |
| | | | ttggcaccagatacctgactcgtaatctg |
| 173 | DNA | Adeno- | atggctgccgatggttatcttccagattggctcgaggacaaccttagtga |
| | | Associated | aggaattcgcgagtggtgggctttgaaacctggagcccctcaacccaagg |
| | | Virus 9 | caaatcaacaacatcaagacaacgctcgaggtcttgtgcttccgggttac |
| | | comprising | aaataccttggacccggcaacggactcgacaagggggagccggtcaacgc |
| | | SEQ | agcagacgcggcggccctcgagcacgacaaggcctacgaccagcagctca |
| | | ID NO: 16 | aggccggagacaacccgtacctcaagtacaaccacgccgacgccgagttc |
| | | | caggagcggctcaaagaagatacgtcttttgggggcaacctcgggcgagc |
| | | | agtcttccaggccaaaaagaggcttcttgaacctcttggtctggttgagg |
| | | | aagcggctaagacggctcctggaaagaagaggcctgtagagcagtctcct |
| | | | caggaaccggactcctccgcgggtattggcaaatcgggtgcacagcccgc |
| | | | taaaaagagactcaatttcggtcagactggcgacacagagtcagtcccag |
| | | | accctcaaccaatcggagaacctcccgcagccccctcaggtgtgggatct |
| | | | cttacaatggcttcaggtggtggcgcaccagtggcagacaataacgaagg |
| | | | tgccgatggagtgggtagttcctcgggaaattggcattgcgattcccaat |
| | | | ggctgggggacagagtcatcaccaccagcacccgaacctgggccctgccc |
| | | | acctacaacaatcacctctacaagcaaatctccaacagcacatctggagg |
| | | | atcttcaaatgacaacgcctacttcggctacagcaccccctgggggtatt |
| | | | ttgacttcaacagattccactgccacttctcaccacgtgactggcagcga |
| | | | ctcatcaacaacaactggggattccggcctaagcgactcaacttcaagct |
| | | | cttcaacattcaggtcaaagaggttacggacaacaatggagtcaagacca |
| | | | tcgccaataaccttaccagcacggtccaggtcttcacggactcagactat |
| | | | cagctcccgtacgtgctcgggtcggctcacgagggctgcctcccgccgtt |
| | | | cccagcggacgttttcatgattcctcagtacgggtatctgacgcttaatg |
| | | | atggaagccaggccgtgggtcgttcgtccttttactgcctggaatatttc |
| | | | ccgtcgcaaatgctaagaacgggtaacaacttccagttcagctacgagtt |
| | | | tgagaacgtacctttccatagcagctacgctcacagccaaagcctggacc |
| | | | gactaatgaatccactcatcgaccaatacttgtactatctctcTaGAact |
| | | | attAACGGTTCTGGACAGAATCAAcaaacgctaaaattcagtgtggccgg |
| | | | acccagcaacatggctgtccagggaagaaactacatacctggacccagct |
| | | | accgacaacaacgtgtctcaaccactgtgactcaaaacaacaacagcgaa |
| | | | tttgcttggcctggagcttcttcttgggctctcaatggacgtaatagctt |
| | | | gatgaatcctggacctgctatggccagccacaaagaaggagaggaccgtt |
| | | | tctttcctttgtctggatctttaatttttggcaaacaaggTacCggCaga |
| | | | gacaacgtggatgcggacaaagtcatgataaccaacgaagaagaaattaa |
| | | | aactactaacccggtagcaacggagtcctatggacaagtggccacaaacc |
| | | | accagagtGCCCAGACGAGGACACCAGTAGAGTTCGCTCAGGCCCAGacc |
| | | | ggttgggttcaaaaccaaggaatacttccgggtatggtttggcaggacag |
| | | | agatgtgtacctgcaaggacccatttgggccaaaattcctcacacggacg |
| | | | gcaactttcacccttctccgctgatgggagggtttggaatgaagcacccg |
| | | | cctcctcagatcctcatcaaaaacacacctgtacctgcggatcctccaac |
| | | | ggccttcaacaaggacaagctgaactctttcatcacccagtattctactg |
| | | | gccaagtcagcgtggagatcgagtgggagctgcagaaggaaaacagcaag |
| | | | cgctggaacccggagatccagtacacttccaactattacaagtctaataa |
| | | | tgttgaatttgctgttaatactgaaggtgtatatagtgaaccccgcccca |
| | | | ttggcaccagatacctgactcgtaatctg |
| 174 | DNA | Adeno- | atggctgccgatggttatcttccagattggctcgaggacaaccttagtga |
| | | Associated | aggaattcgcgagtggtgggctttgaaacctggagcccctcaacccaagg |
| | | Virus 9 | caaatcaacaacatcaagacaacgctcgaggtcttgtgcttccgggttac |
| | | comprising | aaataccttggacccggcaacggactcgacaagggggagccggtcaacgc |
| | | SEQ | agcagacgcggcggccctcgagcacgacaaggcctacgaccagcagctca |
| | | ID NO: 16 | aggccggagacaacccgtacctcaagtacaaccacgccgacgccgagttc |
| | | | caggagcggctcaaagaagatacgtcttttgggggcaacctcgggcgagc |
| | | | agtcttccaggccaaaaagaggcttcttgaacctcttggtctggttgagg |
| | | | aagcggctaagacggctcctggaaagaagaggcctgtagagcagtctcct |
| | | | caggaaccggactcctccgcgggtattggcaaatcgggtgcacagcccgc |
| | | | taaaaagagactcaatttcggtcagactggcgacacagagtcagtcccag |
| | | | accctcaaccaatcggagaacctcccgcagccccctcaggtgtgggatct |
| | | | cttacaatggcttcaggtggtggcgcaccagtggcagacaataacgaagg |
| | | | tgccgatggagtgggtagttcctcgggaaattggcattgcgattcccaat |
| | | | ggctgggggacagagtcatcaccaccagcacccgaacctgggccctgccc |
| | | | acctacaacaatcacctctacaagcaaatctccaacagcacatctggagg |
| | | | atcttcaaatgacaacgcctacttcggctacagcaccccctgggggtatt |
| | | | ttgacttcaacagattccactgccacttctcaccacgtgactggcagcga |
| | | | ctcatcaacaacaactggggattccggcctaagcgactcaacttcaagct |
| | | | cttcaacattcaggtcaaagaggttacggacaacaatggagtcaagacca |
| | | | tcgccaataaccttaccagcacggtccaggtcttcacggactcagactat |
| | | | cagctcccgtacgtgctcgggtcggctcacgagggctgcctcccgccgtt |
| | | | cccagcggacgttttcatgattcctcagtacgggtatctgacgcttaatg |
| | | | atggaagccaggccgtgggtcgttcgtccttttactgcctggaatatttc |
| | | | ccgtcgcaaatgctaagaacgggtaacaacttccagttcagctacgagtt |
| | | | tgagaacgtacctttccatagcagctacgctcacagccaaagcctggacc |
| | | | gactaatgaatccactcatcgaccaatacttgtactatctctcTaGAact |
| | | | attAACGGTTCTGGACAGAATCAAcaaacgctaaaattcagtgtggccgg |
| | | | acccagcaacatggctgtccagggaagaaactacatacctggacccagct |
| | | | accgacaacaacgtgtctcaaccactgtgactcaaaacaacaacagcgaa |
| | | | tttgcttggcctggagcttcttcttgggctctcaatggacgtaatagctt |
| | | | gatgaatcctggacctgctatggccagccacaaagaaggagaggaccgtt |
| | | | tctttcctttgtctggatctttaatttttggcaaacaaggTacCggCaga |
| | | | gacaacgtggatgcggacaaagtcatgataaccaacgaagaagaaattaa |
| | | | aactactaacccggtagcaacggagtcctatggacaagtggccacaaacc |
| | | | accagagtGCTCAAACGCGCACGCCGGTAGAGTTTGCACAAGCACAGacc |
| | | | ggttgggttcaaaaccaaggaatacttccgggtatggtttggcaggacag |
| | | | agatgtgtacctgcaaggacccatttgggccaaaattcctcacacggacg |
| | | | gcaactttcacccttctccgctgatgggagggtttggaatgaagcacccg |
| | | | cctcctcagatcctcatcaaaaacacacctgtacctgcggatcctccaac |
| | | | ggccttcaacaaggacaagctgaactctttcatcacccagtattctactg |
| | | | gccaagtcagcgtggagatcgagtgggagctgcagaaggaaaacagcaag |
| | | | cgctggaacccggagatccagtacacttccaactattacaagtctaataa |
| | | | tgttgaatttgctgttaatactgaaggtgtatatagtgaaccccgcccca |
| | | | ttggcaccagatacctgactcgtaatctg |
| 175 | DNA | Adeno- | atggctgccgatggttatcttccagattggctcgaggacaaccttagtga |
| | | Associated | aggaattcgcgagtggtgggctttgaaacctggagcccctcaacccaagg |
| | | Virus 9 | caaatcaacaacatcaagacaacgctcgaggtcttgtgcttccgggttac |
| | | comprising | aaataccttggacccggcaacggactcgacaagggggagccggtcaacgc |
| | | SEQ | agcagacgcggcggccctcgagcacgacaaggcctacgaccagcagctca |
| | | ID NO: 16 | aggccggagacaacccgtacctcaagtacaaccacgccgacgccgagttc |
| | | | caggagcggctcaaagaagatacgtcttttgggggcaacctcgggcgagc |
| | | | agtcttccaggccaaaaagaggcttcttgaacctcttggtctggttgagg |
| | | | aagcggctaagacggctcctggaaagaagaggcctgtagagcagtctcct |
| | | | caggaaccggactcctccgcgggtattggcaaatcgggtgcacagcccgc |
| | | | taaaaagagactcaatttcggtcagactggcgacacagagtcagtcccag |
| | | | accctcaaccaatcggagaacctcccgcagccccctaggtgtgggatctc |
| | | | ttacaatggcttcaggtggtggcgcaccagtggcagacaataacgaaggt |
| | | | gccgatggagtgggtagttcctcgggaaattggcattgcgattcccaatg |
| | | | gctgggggacagagtcatcaccaccagcacccgaacctgggccctgccca |
| | | | cctacaacaatcacctctacaagcaaatctccaacagcacatctggagga |
| | | | tcttcaaatgacaacgcctacttcggctacagcaccccctgggggtattt |
| | | | tgacttcaacagattccactgccacttctcaccacgtgactggcagcgac |
| | | | tcatcaacaacaactggggattccggcctaagcgactcaacttcaagctc |
| | | | ttcaacattcaggtcaaagaggttacggacaacaatggagtcaagaccat |
| | | | cgccaataaccttaccagcacggtccaggtcttcacggactcagactatc |
| | | | agctcccgtacgtgctcgggtcggctcacgagggctgcctcccgccgttc |
| | | | ccagcggacgttttcatgattcctcagtacgggtatctgacgcttaatga |
| | | | tggaagccaggccgtgggtcgttcgtccttttactgcctggaatatttcc |
| | | | cgtcgcaaatgctaagaacgggtaacaacttccagttcagctacgagttt |
| | | | gagaacgtacctttccatagcagctacgctcacagccaaagcctggaccg |
| | | | actaatgaatccactcatcgaccaatacttgtactatctctcTaGAacta |
| | | | ttAACGGTTCTGGACAGAATCAAcaaacgctaaaattcagtgtggccgga |
| | | | cccagcaacatggctgtccagggaagaaactacatacctggacccagcta |
| | | | ccgacaacaacgtgtctcaaccactgtgactcaaaacaacaacagcgaat |
| | | | ttgcttggcctggagcttcttcttgggctctcaatggacgtaatagcttg |
| | | | atgaatcctggacctgctatggccagccacaaagaaggagaggaccgttt |
| | | | ctttcctttgtctggatctttaatttttggcaaacaaggTacCggCagag |
| | | | acaacgtggatgcggacaaagtcatgataaccaacgaagaagaaattaaa |
| | | | actactaacccggtagcaacggagtcctatggacaagtggccacaaacca |
| | | | ccagagtGCGCAAACTAGGACTCCTGTAGAATTTGCCCAAGCCCAAaccg |
| | | | gttgggttcaaaaccaaggaatacttccgggtatggtttggcaggacaga |
| | | | gatgtgtacctgcaaggacccatttgggccaaaattcctcacacggacgg |
| | | | caactttcacccttctccgctgatgggagggtttggaatgaagcacccgc |
| | | | ctcctcagatcctcatcaaaaacacacctgtacctgcggatcctccaacg |
| | | | gccttcaacaaggacaagctgaactctttcatcacccagtattctactgg |
| | | | ccaagtcagcgtggagatcgagtgggagctgcagaaggaaaacagcaagc |
| | | | gctggaacccggagatccagtacacttccaactattacaagtctaataat |
| | | | gttgaatttgctgttaatactgaaggtgtatatagtgaaccccgccccat |
| | | | tggcaccagatacctgactcgtaatctg |
| 176 | DNA | Adeno- | atggctgccgatggttatcttccagattggctcgaggacaaccttagtga |
| | | Associated | aggaattcgcgagtggtgggctttgaaacctggagcccctcaacccaagg |
| | | Virus 9 | caaatcaacaacatcaagacaacgctcgaggtcttgtgcttccgggttac |
| | | comprising | aaataccttggacccggcaacggactcgacaagggggagccggtcaacgc |
| | | SEQ | agcagacgcggcggccctcgagcacgacaaggcctacgaccagcagctca |
| | | ID NO: 16 | aggccggagacaacccgtacctcaagtacaaccacgccgacgccgagttc |
| | | | caggagcggctcaaagaagatacgtcttttgggggcaacctcgggcgagc |
| | | | agtcttccaggccaaaaagaggcttcttgaacctcttggtctggttgagg |
| | | | aagcggctaagacggctcctggaaagaagaggcctgtagagcagtctcct |
| | | | caggaaccggactcctccgcgggtattggcaaatcgggtgcacagcccgc |
| | | | taaaaagagactcaatttcggtcagactggcgacacagagtcagtcccag |
| | | | accctcaaccaatcggagaacctcccgcagccccctcaggtgtgggatct |
| | | | cttacaatggcttcaggtggtggcgcaccagtggcagacaataacgaagg |
| | | | tgccgatggagtgggtagttcctcgggaaattggcattgcgattcccaat |
| | | | ggctgggggacagagtcatcaccaccagcacccgaacctgggccctgccc |
| | | | acctacaacaatcacctctacaagcaaatctccaacagcacatctggagg |
| | | | atcttcaaatgacaacgcctacttcggctacagcaccccctgggggtatt |
| | | | ttgacttcaacagattccactgccacttctcaccacgtgactggcagcga |
| | | | ctcatcaacaacaactggggattccggcctaagcgactcaacttcaagct |
| | | | cttcaacattcaggtcaaagaggttacggacaacaatggagtcaagacca |
| | | | tcgccaataaccttaccagcacggtccaggtcttcacggactcagactat |
| | | | cagctcccgtacgtgctcgggtcggctcacgagggctgcctcccgccgtt |
| | | | cccagcggacgttttcatgattcctcagtacgggtatctgacgcttaatg |
| | | | atggaagccaggccgtgggtcgttcgtccttttactgcctggaatatttc |
| | | | ccgtcgcaaatgctaagaacgggtaacaacttccagttcagctacgagtt |
| | | | tgagaacgtacctttccatagcagctacgctcacagccaaagcctggacc |
| | | | gactaatgaatccactcatcgaccaatacttgtactatctctcTaGAact |
| | | | attAACGGTTCTGGACAGAATCAAcaaacgctaaaattcagtgtggccgg |
| | | | acccagcaacatggctgtccagggaagaaactacatacctggacccagct |
| | | | accgacaacaacgtgtctcaaccactgtgactcaaaacaacaacagcgaa |
| | | | tttgcttggcctggagcttcttcttgggctctcaatggacgtaatagctt |
| | | | gatgaatcctggacctgctatggccagccacaaagaaggagaggaccgtt |
| | | | tctttcctttgtctggatctttaatttttggcaaacaaggTacCggCaga |
| | | | gacaacgtggatgcggacaaagtcatgataaccaacgaagaagaaattaa |
| | | | aactactaacccggtagcaacggagtcctatggacaagtggccacaaacc |
| | | | accagagtGCCCAGACCCGGACTCCTGTTGAATTCGCCCAGGCCCAAacc |
| | | | ggttgggttcaaaaccaaggaatacttccgggtatggtttggcaggacag |
| | | | agatgtgtacctgcaaggacccatttgggccaaaattcctcacacggacg |
| | | | gcaactttcacccttctccgctgatgggagggtttggaatgaagcacccg |
| | | | cctcctcagatcctcatcaaaaacacacctgtacctgcggatcctccaac |
| | | | ggccttcaacaaggacaagctgaactctttcatcacccagtattctactg |
| | | | gccaagtcagcgtggagatcgagtgggagctgcagaaggaaaacagcaag |
| | | | cgctggaacccggagatccagtacacttccaactattacaagtctaataa |
| | | | tgttgaatttgctgttaatactgaaggtgtatatagtgaaccccgcccca |
| | | | ttggcaccagatacctgactcgtaatctg |
| 177 | DNA | Adeno- | atggctgccgatggttatcttccagattggctcgaggacaaccttagtga |
| | | Associated | aggaattcgcgagtggtgggctttgaaacctggagcccctcaacccaagg |
| | | Virus 9 | caaatcaacaacatcaagacaacgctcgaggtcttgtgcttccgggttac |
| | | comprising | aaataccttggacccggcaacggactcgacaagggggagccggtcaacgc |
| | | SEQ | agcagacgcggcggccctcgagcacgacaaggcctacgaccagcagctca |
| | | ID NO: 16 | aggccggagacaacccgtacctcaagtacaaccacgccgacgccgagttc |
| | | | caggagcggctcaaagaagatacgtcttttgggggcaacctcgggcgagc |
| | | | agtcttccaggccaaaaagaggcttcttgaacctcttggtctggttgagg |
| | | | aagcggctaagacggctcctggaaagaagaggcctgtagagcagtctcct |
| | | | caggaaccggactcctccgcgggtattggcaaatcgggtgcacagcccgc |
| | | | taaaaagagactcaatttcggtcagactggcgacacagagtcagtcccag |
| | | | accctcaaccaatcggagaacctcccgcagccccctaggtgtgggatctc |
| | | | ttacaatggcttcaggtggtggcgcaccagtggcagacaataacgaaggt |
| | | | gccgatggagtgggtagttcctcgggaaattggcattgcgattcccaatg |
| | | | gctgggggacagagtcatcaccaccagcacccgaacctgggccctgccca |
| | | | cctacaacaatcacctctacaagcaaatctccaacagcacatctggagga |
| | | | tcttcaaatgacaacgcctacttcggctacagcaccccctgggggtattt |
| | | | tgacttcaacagattccactgccacttctcaccacgtgactggcagcgac |
| | | | tcatcaacaacaactggggattccggcctaagcgactcaacttcaagctc |
| | | | ttcaacattcaggtcaaagaggttacggacaacaatggagtcaagaccat |
| | | | cgccaataaccttaccagcacggtccaggtcttcacggactcagactatc |
| | | | agctcccgtacgtgctcgggtcggctcacgagggctgcctcccgccgttc |
| | | | ccagcggacgttttcatgattcctcagtacgggtatctgacgcttaatga |
| | | | tggaagccaggccgtgggtcgttcgtccttttactgcctggaatatttcc |
| | | | cgtcgcaaatgctaagaacgggtaacaacttccagttcagctacgagttt |
| | | | gagaacgtacctttccatagcagctacgctcacagccaaagcctggaccg |
| | | | actaatgaatccactcatcgaccaatacttgtactatctctcTaGAacta |
| | | | ttAACGGTTCTGGACAGAATCAAcaaacgctaaaattcagtgtggccgga |
| | | | cccagcaacatggctgtccagggaagaaactacatacctggacccagcta |
| | | | ccgacaacaacgtgtctcaaccactgtgactcaaaacaacaacagcgaat |
| | | | ttgcttggcctggagcttcttcttgggctctcaatggacgtaatagcttg |
| | | | atgaatcctggacctgctatggccagccacaaagaaggagaggaccgttt |
| | | | ctttcctttgtctggatctttaatttttggcaaacaaggTacCggCagag |
| | | | acaacgtggatgcggacaaagtcatgataaccaacgaagaagaaattaaa |
| | | | actactaacccggtagcaacggagtcctatggacaagtggccacaaacca |
| | | | ccagagtGCCCAAACAAGGACGCCGGTCGAATTTGCACAAGCTCAAaccg |
| | | | gttgggttcaaaaccaaggaatacttccgggtatggtttggcaggacaga |
| | | | gatgtgtacctgcaaggacccatttgggccaaaattcctcacacggacgg |
| | | | caactttcacccttctccgctgatgggagggtttggaatgaagcacccgc |
| | | | ctcctcagatcctcatcaaaaacacacctgtacctgcggatcctccaacg |
| | | | gccttcaacaaggacaagctgaactctttcatcacccagtattctactgg |
| | | | ccaagtcagcgtggagatcgagtgggagctgcagaaggaaaacagcaagc |
| | | | gctggaacccggagatccagtacacttccaactattacaagtctaataat |
| | | | gttgaatttgctgttaatactgaaggtgtatatagtgaaccccgccccat |
| | | | tggcaccagatacctgactcgtaatctg |
| 178 | DNA | Adeno- | atggctgccgatggttatcttccagattggctcgaggacaaccttagtga |
| | | Associated | aggaattcgcgagtggtgggctttgaaacctggagcccctcaacccaagg |
| | | Virus 9 | caaatcaacaacatcaagacaacgctcgaggtcttgtgcttccgggttac |
| | | comprising | aaataccttggacccggcaacggactcgacaagggggagccggtcaacgc |
| | | SEQ | agcagacgcggcggccctcgagcacgacaaggcctacgaccagcagctca |
| | | ID NO: 16 | aggrcggagacaacccgtacctcaagtacaaccacgccgacgccgagttc |
| | | | caggagcggctcaaagaagatacgtcttttgggggcaacctcgggcgagc |
| | | | agtcttccaggccaaaaagaggcttcttgaacctcttggtctggttgagg |
| | | | aagcggctaagacggctcctggaaagaagaggcctgtagagcagtctcct |
| | | | caggaaccggactcctccgcgggtattggcaaatcgggtgcacagcccgc |
| | | | taaaaagagactcaatttcggtcagactggcgacacagagtcagtcccag |
| | | | accctcaaccaatcggagaacctcccgcagccccctcaggtgtgggatct |
| | | | cttacaatggcttcaggtggtggcgcaccagtggcagacaataacgaagg |
| | | | tgccgatggagtgggtagttcctcgggaaattggcattgcgattcccaat |
| | | | ggctgggggacagagtcatcaccaccagcacccgaacctgggccctgccc |
| | | | acctacaacaatcacctctacaagcaaatctccaacagcacatctggagg |
| | | | atcttcaaatgacaacgcctacttcggctacagcaccccctgggggtatt |
| | | | ttgacttcaacagattccactgccacttctcaccacgtgactggcagcga |
| | | | ctcatcaacaacaactggggattccggcctaagcgactcaacttcaagct |
| | | | cttcaacattcaggtcaaagaggttacggacaacaatggagtcaagacca |
| | | | tcgccaataaccttaccagcacggtccaggtcttcacggactcagactat |
| | | | cagctcccgtacgtgctcgggtcggctcacgagggctgcctcccgccgtt |
| | | | cccagcggacgttttcatgattcctcagtacgggtatctgacgcttaatg |
| | | | atggaagccaggccgtgggtcgttcgtccttttactgcctggaatatttc |
| | | | ccgtcgcaaatgctaagaacgggtaacaacttccagttcagctacgagtt |
| | | | tgagaacgtacctttccatagcagctacgctcacagccaaagcctggacc |
| | | | gactaatgaatccactcatcgaccaatacttgtactatctctcTaGAact |
| | | | attAACGGTTCTGGACAGAATCAAcaaacgctaaaattcagtgtggccgg |
| | | | acccagcaacatggctgtccagggaagaaactacatacctggacccagct |
| | | | accgacaacaacgtgtctcaaccactgtgactcaaaacaacaacagcgaa |
| | | | tttgcttggcctggagcttcttcttgggctctcaatggacgtaatagctt |
| | | | gatgaatcctggacctgctatggccagccacaaagaaggagaggaccgtt |
| | | | tctttcctttgtctggatctttaatttttggcaaacaaggTacCggCaga |
| | | | gacaacgtggatgcggacaaagtcatgataaccaacgaagaagaaattaa |
| | | | aactactaacccggtagcaacggagtcctatggacaagtggccacaaacc |
| | | | accagagtGCACAAACTCGTACGCCGGTTGAGTTTGCCCAGGCGCAGacc |
| | | | ggttgggttcaaaaccaaggaatacttccgggtatggtttggcaggacag |
| | | | agatgtgtacctgcaaggacccatttgggccaaaattcctcacacggacg |
| | | | gcaactttcacccttctccgctgatgggagggtttggaatgaagcacccg |
| | | | cctcctcagatcctcatcaaaaacacacctgtacctgcggatcctccaac |
| | | | ggccttcaacaaggacaagctgaactctttcatcacccagtattctactg |
| | | | gccaagtcagcgtggagatcgagtgggagctgcagaaggaaaacagcaag |
| | | | cgctggaacccggagatccagtacacttccaactattacaagtctaataa |
| | | | tgttgaatttgctgttaatactgaaggtgtatatagtgaaccccgcccca |
| | | | ttggcaccagatacctgactcgtaatctg |
| 179 | DNA | Adeno- | atggctgccgatggttatcttccagattggctcgaggacaaccttagtga |
| | | Associated | aggaattcgcgagtggtgggctttgaaacctggagcccctcaacccaagg |
| | | Virus 9 | caaatcaacaacatcaagacaacgctcgaggtcttgtgcttccgggttac |
| | | comprising | aaataccttggacccggcaacggactcgacaagggggagccggtcaacgc |
| | | SEQ | agcagacgcggcggccctcgagcacgacaaggcctacgaccagcagctca |
| | | ID NO: 16 | aggccggagacaacccgtacctcaagtacaaccacgccgacgccgagttc |
| | | | caggagcggctcaaagaagatacgtcttttgggggcaacctcgggcgagc |
| | | | agtcttccaggccaaaaagaggcttcttgaacctcttggtctggttgagg |
| | | | aagcggctaagacggctcctggaaagaagaggcctgtagagcagtctcct |
| | | | caggaaccggactcctccgcgggtattggcaaatcgggtgcacagcccgc |
| | | | taaaaagagactcaatttcggtcagactggcgacacagagtcagtcccag |
| | | | accctcaaccaatcggagaacctcccgcagccccctcaggtgtgggatct |
| | | | cttacaatggcttcaggtggtggcgcaccagtggcagacaataacgaagg |
| | | | tgccgatggagtgggtagttcctcgggaaattggcattgcgattcccaat |
| | | | ggctgggggacagagtcatcaccaccagcacccgaacctgggccctgccc |
| | | | acctacaacaatcacctctacaagcaaatctccaacagcacatctggagg |
| | | | atcttcaaatgacaacgcctacttcggctacagcaccccctgggggtatt |
| | | | ttgacttcaacagattccactgccacttctcaccacgtgactggcagcga |
| | | | ctcatcaacaacaactggggattccggcctaagcgactcaacttcaagct |
| | | | cttcaacattcaggtcaaagaggttacggacaacaatggagtcaagacca |
| | | | tcgccaataaccttaccagcacggtccaggtcttcacggactcagactat |
| | | | cagctcccgtacgtgctcgggtcggctcacgagggctgcctcccgccgtt |
| | | | cccagcggacgttttcatgattcctcagtacgggtatctgacgcttaatg |
| | | | atggaagccaggccgtgggtcgttcgtccttttactgcctggaatatttc |
| | | | ccgtcgcaaatgctaagaacgggtaacaacttccagttcagctacgagtt |
| | | | tgagaacgtacctttccatagcagctacgctcacagccaaagcctggacc |
| | | | gactaatgaatccactcatcgaccaatacttgtactatctctcTaGAact |
| | | | attAACGGTTCTGGACAGAATCAAcaaacgctaaaattcagtgtggccgg |
| | | | acccagcaacatggctgtccagggaagaaactacatacctggacccagct |
| | | | accgacaacaacgtgtctcaaccactgtgactcaaaacaacaacagcgaa |
| | | | tttgcttggcctggagcttcttcttgggctctcaatggacgtaatagctt |
| | | | gatgaatcctggacctgctatggccagccacaaagaaggagaggaccgtt |
| | | | tctttcctttgtctggatctttaatttttggcaaacaaggTacCggCaga |
| | | | gacaacgtggatgcggacaaagtcatgataaccaacgaagaagaaattaa |
| | | | aactactaacccggtagcaacggagtcctatggacaagtggccacaaacc |
| | | | accagagtGCTCAGACGCGTACGCCGGTGGAGTTCGCTCAGGCGCAGacc |
| | | | ggttgggttcaaaaccaaggaatacttccgggtatggtttggcaggacag |
| | | | agatgtgtacctgcaaggacccatttgggccaaaattcctcacacggacg |
| | | | gcaactttcacccttctccgctgatgggagggtttggaatgaagcacccg |
| | | | cctcctcagatcctcatcaaaaacacacctgtacctgcggatcctccaac |
| | | | ggccttcaacaaggacaagctgaactctttcatcacccagtattctactg |
| | | | gccaagtcagcgtggagatcgagtgggagctgcagaaggaaaacagcaag |
| | | | cgctggaacccggagatccagtacacttccaactattacaagtctaataa |
| | | | tgttgaatttgctgttaatactgaaggtgtatatagtgaaccccgcccca |
| | | | ttggcaccagatacctgactcgtaatctg |
| 180 | DNA | Adeno- | atggctgccgatggttatcttccagattggctcgaggacaaccttagtga |
| | | Associated | aggaattcgcgagtggtgggctttgaaacctggagcccctcaacccaagg |
| | | Virus 9 | caaatcaacaacatcaagacaacgctcgaggtcttgtgcttccgggttac |
| | | comprising | aaataccttggacccggcaacggactcgacaagggggagccggtcaacgc |
| | | SEQ | agcagacgcggcggccctcgagcacgacaaggcctacgaccagcagctca |
| | | ID NO: 16 | aggccggagacaacccgtacctcaagtacaaccacgccgacgccgagttc |
| | | | caggagcggctcaaagaagatacgtcttttgggggcaacctcgggcgagc |
| | | | agtcttccaggccaaaaagaggcttcttgaacctcttggtctggttgagg |
| | | | aagcggctaagacggctcctggaaagaagaggcctgtagagcagtctcct |
| | | | caggaaccggactcctccgcgggtattggcaaatcgggtgcacagcccgc |
| | | | taaaaagagactcaatttcggtcagactggcgacacagagtcagtcccag |
| | | | accctcaaccaatcggagaacctcccgcagccccctcaggtgtgggatct |
| | | | cttacaatggcttcaggtggtggcgcaccagtggcagacaataacgaagg |
| | | | tgccgatggagtgggtagttcctcgggaaattggcattgcgattcccaat |
| | | | ggctgggggacagagtcatcaccaccagcacccgaacctgggccctgccc |
| | | | acctacaacaatcacctctacaagcaaatctccaacagcacatctggagg |
| | | | atcttcaaatgacaacgcctacttcggctacagcaccccctgggggtatt |
| | | | ttgacttcaacagattccactgccacttctcaccacgtgactggcagcga |
| | | | ctcatcaacaacaactggggattccggcctaagcgactcaacttcaagct |
| | | | cttcaacattcaggtcaaagaggttacggacaacaatggagtcaagacca |
| | | | tcgccaataaccttaccagcacggtccaggtcttcacggactcagactat |
| | | | cagctcccgtacgtgctcgggtcggctcacgagggctgcctcccgccgtt |
| | | | cccagcggacgttttcatgattcctcagtacgggtatctgacgcttaatg |
| | | | atggaagccaggccgtgggtcgttcgtccttttactgcctggaatatttc |
| | | | ccgtgcaaatgctaagaacgggtaacaacttccagttcagctacgagttt |
| | | | gagaacgtacctttccatagcagctacgctcacagccaaagcctggaccg |
| | | | actaatgaatccactcatcgaccaatacttgtactatctctcTaGAacta |
| | | | ttAACGGTTCTGGACAGAATCAAcaaacgctaaaattcagtgtggccgga |
| | | | cccagcaacatggctgtccagggaagaaactacatacctggacccagcta |
| | | | ccgacaacaacgtgtctcaaccactgtgactcaaaacaacaacagcgaat |
| | | | ttgcttggcctggagcttcttcttgggctctcaatggacgtaatagcttg |
| | | | atgaatcctggacctgctatggccagccacaaagaaggagaggaccgttt |
| | | | ctttcctttgtctggatctttaatttttggcaaacaaggTacCggCagag |
| | | | acaacgtggatgcggacaaagtcatgataaccaacgaagaagaaattaaa |
| | | | actactaacccggtagcaacggagtcctatggacaagtggccacaaacca |
| | | | ccagagtGCGCAGACGCGCACCCCAGTTGAGTTCGCCCAGGCCCAGaccg |
| | | | gttgggttcaaaaccaaggaatacttccgggtatggtttggcaggacaga |
| | | | gatgtgtacctgcaaggacccatttgggccaaaattcctcacacggacgg |
| | | | caactttcacccttctccgctgatgggagggtttggaatgaagcacccgc |
| | | | ctcctcagatcctcatcaaaaacacacctgtacctgcggatcctccaacg |
| | | | gccttcaacaaggacaagctgaactctttcatcacccagtattctactgg |
| | | | ccaagtcagcgtggagatcgagtgggagctgcagaaggaaaacagcaagc |
| | | | gctggaacccggagatccagtacacttccaactattacaagtctaataat |
| | | | gttgaatttgctgttaatactgaaggtgtatatagtgaaccccgccccat |
| | | | tggcaccagatacctgactcgtaatctg |
| 181 | DNA | Adeno- | atggctgccgatggttatcttccagattggctcgaggacaaccttagtga |
| | | Associated | aggaattcgcgagtggtgggctttgaaacctggagcccctcaacccaagg |
| | | Virus 9 | caaatcaacaacatcaagacaacgctcgaggtcttgtgcttccgggttac |
| | | comprising | aaataccttggacccggcaacggactcgacaagggggagccggtcaacgc |
| | | SEQ | agcagacgcggcggccctcgagcacgacaaggcctacgaccagcagctca |
| | | ID NO: 17 | aggccggagacaacccgtacctcaagtacaaccacgccgacgccgagttc |
| | | | caggagcggctcaaagaagatacgtcttttgggggcaacctcgggcgagc |
| | | | agtcttccaggccaaaaagaggcttcttgaacctcttggtctggttgagg |
| | | | aagcggctaagacggctcctggaaagaagaggcctgtagagcagtctcct |
| | | | caggaaccggactcctccgcgggtattggcaaatcgggtgcacagcccgc |
| | | | taaaaagagactcaatttcggtcagactggcgacacagagtcagtcccag |
| | | | accctcaaccaatcggagaacctcccgcagccccctcaggtgtgggatct |
| | | | cttacaatggcttcaggtggtggcgcaccagtggcagacaataacgaagg |
| | | | tgccgatggagtgggtagttcctcgggaaattggcattgcgattcccaat |
| | | | ggctgggggacagagtcatcaccaccagcacccgaacctgggccctgccc |
| | | | acctacaacaatcacctctacaagcaaatctccaacagcacatctggagg |
| | | | atcttcaaatgacaacgcctacttcggctacagcaccccctgggggtatt |
| | | | ttgacttcaacagattccactgccacttctcaccacgtgactggcagcga |
| | | | ctcatcaacaacaactggggattccggcctaagcgactcaacttcaagct |
| | | | cttcaacattcaggtcaaagaggttacggacaacaatggagtcaagacca |
| | | | tcgccaataaccttaccagcacggtccaggtcttcacggactcagactat |
| | | | cagctcccgtacgtgctcgggtcggctcacgagggctgcctcccgccgtt |
| | | | cccagcggacgttttcatgattcctcagtacgggtatctgacgcttaatg |
| | | | atggaagccaggccgtgggtcgttcgtccttttactgcctggaatatttc |
| | | | ccgtcgcaaatgctaagaacgggtaacaacttccagttcagctacgagtt |
| | | | tgagaacgtacctttccatagcagctacgctcacagccaaagcctggacc |
| | | | gactaatgaatccactcatcgaccaatacttgtactatctctcTaGAact |
| | | | attAACGGTTCTGGACAGAATCAAcaaacgctaaaattcagtgtggccgg |
| | | | acccagcaacatggctgtccagggaagaaactacatacctggacccagct |
| | | | accgacaacaacgtgtctcaaccactgtgactcaaaacaacaacagcgaa |
| | | | tttgcttggcctggagcttcttcttgggctctcaatggacgtaatagctt |
| | | | gatgaatcctggacctgctatggccagccacaaagaaggagaggaccgtt |
| | | | tctttcctttgtctggatctttaatttttggcaaacaaggTacCggCaga |
| | | | gacaacgtggatgcggacaaagtcatgataaccaacgaagaagaaattaa |
| | | | aactactaacccggtagcaacggagtcctatggacaagtggccacaaacc |
| | | | accagagtGCGCAGGAGAACCATACTAGGGATAAAGCACAGGCCCAGacc |
| | | | ggttgggttcaaaaccaaggaatacttccgggtatggtttggcaggacag |
| | | | agatgtgtacctgcaaggacccatttgggccaaaattcctcacacggacg |
| | | | gcaactttcacccttctccgctgatgggagggtttggaatgaagcacccg |
| | | | cctcctcagatcctcatcaaaaacacacctgtacctgcggatcctccaac |
| | | | ggccttcaacaaggacaagctgaactctttcatcacccagtattctactg |
| | | | gccaagtcagcgtggagatcgagtgggagctgcagaaggaaaacagcaag |
| | | | cgctggaacccggagatccagtacacttccaactattacaagtctaataa |
| | | | tgttgaatttgctgttaatactgaaggtgtatatagtgaaccccgcccca |
| | | | ttggcaccagatacctgactcgtaatctg |
| 182 | DNA | Adeno- | atggctgccgatggttatcttccagattggctcgaggacaaccttagtga |
| | | Associated | aggaattcgcgagtggtgggctttgaaacctggagcccctcaacccaagg |
| | | Virus 9 | caaatcaacaacatcaagacaacgctcgaggtcttgtgcttccgggttac |
| | | comprising | aaataccttggacccggcaacggactcgacaagggggagccggtcaacgc |
| | | SEQ | agcagacgcggcggccctcgagcacgacaaggcctacgaccagcagctca |
| | | ID NO: 17 | aggccggagacaacccgtacctcaagtacaaccacgccgacgccgagttc |
| | | | caggagcggctcaaagaagatacgtcttttgggggcaacctcgggcgagc |
| | | | agtcttccaggccaaaaagaggcttcttgaacctcttggtctggttgagg |
| | | | aagcggctaagacggctcctggaaagaagaggcctgtagagcagtctcct |
| | | | caggaaccggactcctccgcgggtattggcaaatcgggtgcacagcccgc |
| | | | taaaaagagactcaatttcggtcagactggcgacacagagtcagtcccag |
| | | | accctcaaccaatcggagaacctcccgcagccccctcaggtgtgggatct |
| | | | cttacaatggcttcaggtggtggcgcaccagtggcagacaataacgaagg |
| | | | tgccgatggagtgggtagttcctcgggaaattggcattgcgattcccaat |
| | | | ggctgggggacagagtcatcaccaccagcacccgaacctgggccctgccc |
| | | | acctacaacaatcacctctacaagcaaatctccaacagcacatctggagg |
| | | | atcttcaaatgacaacgcctacttcggctacagcaccccctgggggtatt |
| | | | ttgacttcaacagattccactgccacttctcaccacgtgactggcagcga |
| | | | ctcatcaacaacaactggggattccggcctaagcgactcaacttcaagct |
| | | | cttcaacattcaggtcaaagaggttacggacaacaatggagtcaagacca |
| | | | tcgccaataaccttaccagcacggtccaggtcttcacggactcagactat |
| | | | cagctcccgtacgtgctcgggtcggctcacgagggctgcctcccgccgtt |
| | | | cccagcggacgttttcatgattcctcagtacgggtatctgacgcttaatg |
| | | | atggaagccaggccgtgggtcgttcgtccttttactgcctggaatatttc |
| | | | ccgtcgcaaatgctaagaacgggtaacaacttccagttcagctacgagtt |
| | | | tgagaacgtacctttccatagcagctacgctcacagccaaagcctggacc |
| | | | gactaatgaatccactcatcgaccaatacttgtactatctctcTaGAact |
| | | | attAACGGTTCTGGACAGAATCAAcaaacgctaaaattcagtgtggccgg |
| | | | acccagcaacatggctgtccagggaagaaactacatacctggacccagct |
| | | | accgacaacaacgtgtctcaaccactgtgactcaaaacaacaacagcgaa |
| | | | tttgcttggcctggagcttcttcttgggctctcaatggacgtaatagctt |
| | | | gatgaatcctggacctgctatggccagccacaaagaaggagaggaccgtt |
| | | | tctttcctttgtctggatctttaatttttggcaaacaaggTacCggCaga |
| | | | gacaacgtggatgcggacaaagtcatgataaccaacgaagaagaaattaa |
| | | | aactactaacccggtagcaacggagtcctatggacaagtggccacaaacc |
| | | | accagagtGCACAGGAGAATCATACTCGTGATAAAGCTCAAGCCCAGacc |
| | | | ggttgggttcaaaaccaaggaatacttccgggtatggtttggcaggacag |
| | | | agatgtgtacctgcaaggacccatttgggccaaaattcctcacacggacg |
| | | | gcaactttcacccttctccgctgatgggagggtttggaatgaagcacccg |
| | | | cctcctcagatcctcatcaaaaacacacctgtacctgcggatcctccaac |
| | | | ggccttcaacaaggacaagctgaactctttcatcacccagtattctactg |
| | | | gccaagtcagcgtggagatcgagtgggagctgcagaaggaaaacagcaag |
| | | | cgctggaacccggagatccagtacacttccaactattacaagtctaataa |
| | | | tgttgaatttgctgttaatactgaaggtgtatatagtgaaccccgcccca |
| | | | ttggcaccagatacctgactcgtaatctg |
| 183 | DNA | Adeno- | atggctgccgatggttatcttccagattggctcgaggacaaccttagtga |
| | | Associated | aggaattcgcgagtggtgggctttgaaacctggagcccctcaacccaagg |
| | | Virus 9 | caaatcaacaacatcaagacaacgctcgaggtcttgtgcttccgggttac |
| | | comprising | aaataccttggacccggcaacggactcgacaagggggagccggtcaacgc |
| | | SEQ | agcagacgcggcggccctcgagcacgacaaggcctacgaccagcagctca |
| | | ID NO: 17 | aggccggagacaacccgtacctcaagtacaaccacgccgacgccgagttc |
| | | | caggagcggctcaaagaagatacgtcttttgggggcaacctcgggcgagc |
| | | | agtcttccaggccaaaaagaggcttcttgaacctcttggtctggttgagg |
| | | | aagcggctaagacggctcctggaaagaagaggcctgtagagcagtctcct |
| | | | caggaaccggactcctccgcgggtattggcaaatcgggtgcacagcccgc |
| | | | taaaaagagactcaatttcggtcagactggcgacacagagtcagtcccag |
| | | | accctcaaccaatcggagaacctcccgcagccccctcaggtgtgggatct |
| | | | cttacaatggcttcaggtggtggcgcaccagtggcagacaataacgaagg |
| | | | tgccgatggagtgggtagttcctcgggaaattggcattgcgattcccaat |
| | | | ggctgggggacagagtcatcaccaccagcacccgaacctgggccctgccc |
| | | | acctacaacaatcacctctacaagcaaatctccaacagcacatctggagg |
| | | | atcttcaaatgacaacgcctacttcggctacagcaccccctgggggtatt |
| | | | ttgacttcaacagattccactgccacttctcaccacgtgactggcagcga |
| | | | ctcatcaacaacaactggggattccggcctaagcgactcaacttcaagct |
| | | | cttcaacattcaggtcaaagaggttacggacaacaatggagtcaagacca |
| | | | tcgccaataaccttaccagcacggtccaggtcttcacggactcagactat |
| | | | cagctcccgtacgtgctcgggtcggctcacgagggctgcctcccgccgtt |
| | | | cccagcggacgttttcatgattcctcagtacgggtatctgacgcttaatg |
| | | | atggaagccaggccgtgggtcgttcgtccttttactgcctggaatatttc |
| | | | ccgtcgcaaatgctaagaacgggtaacaacttccagttcagctacgagtt |
| | | | tgagaacgtacctttccatagcagctacgctcacagccaaagcctggacc |
| | | | gactaatgaatccactcatcgaccaatacttgtactatctctcTaGAact |
| | | | attAACGGTTCTGGACAGAATCAAcaaacgctaaaattcagtgtggccgg |
| | | | acccagcaacatggctgtccagggaagaaactacatacctggacccagct |
| | | | accgacaacaacgtgtctcaaccactgtgactcaaaacaacaacagcgaa |
| | | | tttgcttggcctggagcttcttcttgggctctcaatggacgtaatagctt |
| | | | gatgaatcctggacctgctatggccagccacaaagaaggagaggaccgtt |
| | | | tctttcctttgtctggatctttaatttttggcaaacaaggTacCggCaga |
| | | | gacaacgtggatgcggacaaagtcatgataaccaacgaagaagaaattaa |
| | | | aactactaacccggtagcaacggagtcctatggacaagtggccacaaacc |
| | | | accagagtGCACAAGAGAATCACACTAGAGATAAAGCACAAGCTCAAacc |
| | | | ggttgggttcaaaaccaaggaatacttccgggtatggtttggcaggacag |
| | | | agatgtgtacctgcaaggacccatttgggccaaaattcctcacacggacg |
| | | | gcaactttcacccttctccgctgatgggagggtttggaatgaagcacccg |
| | | | cctcctcagatcctcatcaaaaacacacctgtacctgcggatcctccaac |
| | | | ggccttcaacaaggacaagctgaactctttcatcacccagtattctactg |
| | | | gccaagtcagcgtggagatcgagtgggagctgcagaaggaaaacagcaag |
| | | | cgctggaacccggagatccagtacacttccaactattacaagtctaataa |
| | | | tgttgaatttgctgttaatactgaaggtgtatatagtgaaccccgcccca |
| | | | ttggcaccagatacctgactcgtaatctg |
| 184 | DNA | Adeno- | atggctgccgatggttatcttccagattggctcgaggacaaccttagtga |
| | | Associated | aggaattcgcgagtggtgggctttgaaacctggagcccctcaacccaagg |
| | | Virus 9 | caaatcaacaacatcaagacaacgctcgaggtcttgtgcttccgggttac |
| | | comprising | aaataccttggacccggcaacggactcgacaagggggagccggtcaacgc |
| | | SEQ | agcagacgcggcggccctcgagcacgacaaggcctacgaccagcagctca |
| | | ID NO: 17 | aggccggagacaacccgtacctcaagtacaaccacgccgacgccgagttc |
| | | | caggagcggctcaaagaagatacgtcttttgggggcaacctcgggcgagc |
| | | | agtcttccaggccaaaaagaggcttcttgaacctcttggtctggttgagg |
| | | | aagcggctaagacggctcctggaaagaagaggcctgtagagcagtctcct |
| | | | caggaaccggactcctccgcgggtattggcaaatcgggtgcacagcccgc |
| | | | taaaaagagactcaatttcggtcagactggcgacacagagtcagtcccag |
| | | | accctcaaccaatcggagaacctcccgcagccccctcaggtgtgggatct |
| | | | cttacaatggcttcaggtggtggcgcaccagtggcagacaataacgaagg |
| | | | tgccgatggagtgggtagttcctcgggaaattggcattgcgattcccaat |
| | | | ggctgggggacagagtcatcaccaccagcacccgaacctgggccctgccc |
| | | | acctacaacaatcacctctacaagcaaatctccaacagcacatctggagg |
| | | | atcttcaaatgacaacgcctacttcggctacagcaccccctgggggtatt |
| | | | ttgacttcaacagattccactgccacttctcaccacgtgactggcagcga |
| | | | ctcatcaacaacaactggggattccggcctaagcgactcaacttcaagct |
| | | | cttcaacattcaggtcaaagaggttacggacaacaatggagtcaagacca |
| | | | tcgccaataaccttaccagcacggtccaggtcttcacggactcagactat |
| | | | cagctcccgtacgtgctcgggtcggctcacgagggctgcctcccgccgtt |
| | | | cccagcggacgttttcatgattcctcagtacgggtatctgacgcttaatg |
| | | | atggaagccaggccgtgggtcgttcgtccttttactgcctggaatatttc |
| | | | ccgtcgcaaatgctaagaacgggtaacaacttccagttcagctacgagtt |
| | | | tgagaacgtacctttccatagcagctacgctcacagccaaagcctggacc |
| | | | gactaatgaatccactcatcgaccaatacttgtactatctctcTaGAact |
| | | | attAACGGTTCTGGACAGAATCAAcaaacgctaaaattcagtgtggccgg |
| | | | acccagcaacatggctgtccagggaagaaactacatacctggacccagct |
| | | | accgacaacaacgtgtctcaaccactgtgactcaaaacaacaacagcgaa |
| | | | tttgcttggcctggagcttcttcttgggctctcaatggacgtaatagctt |
| | | | gatgaatcctggacctgctatggccagccacaaagaaggagaggaccgtt |
| | | | tctttcctttgtctggatctttaatttttggcaaacaaggTacCggCaga |
| | | | gacaacgtggatgcggacaaagtcatgataaccaacgaagaagaaattaa |
| | | | aactactaacccggtagcaacggagtcctatggacaagtggccacaaacc |
| | | | accagagtGCGCAAGAAAACCACACTCGCGATAAAGCACAAGCACAAacc |
| | | | ggttgggttcaaaaccaaggaatacttccgggtatggtttggcaggacag |
| | | | agatgtgtacctgcaaggacccatttgggccaaaattcctcacacggacg |
| | | | gcaactttcacccttctccgctgatgggagggtttggaatgaagcacccg |
| | | | cctcctcagatcctcatcaaaaacacacctgtacctgcggatcctccaac |
| | | | ggccttcaacaaggacaagctgaactctttcatcacccagtattctactg |
| | | | gccaagtcagcgtggagatcgagtgggagctgcagaaggaaaacagcaag |
| | | | cgctggaacccggagatccagtacacttccaactattacaagtctaataa |
| | | | tgttgaatttgctgttaatactgaaggtgtatatagtgaaccccgcccca |
| | | | ttggcaccagatacctgactcgtaatctg |
| 185 | DNA | Adeno- | atggctgccgatggttatcttccagattggctcgaggacaaccttagtga |
| | | Associated | aggaattcgcgagtggtgggctttgaaacctggagcccctcaacccaagg |
| | | Virus 9 | caaatcaacaacatcaagacaacgctcgaggtcttgtgcttccgggttac |
| | | comprising | aaataccttggacccggcaacggactcgacaagggggagccggtcaacgc |
| | | SEQ | agcagacgcggcggccctcgagcacgacaaggcctacgaccagcagctca |
| | | ID NO: 17 | aggccggagacaacccgtacctcaagtacaaccacgccgacgccgagttc |
| | | | caggagcggctcaaagaagatacgtcttttgggggcaacctcgggcgagc |
| | | | agtcttccaggccaaaaagaggcttcttgaacctcttggtctggttgagg |
| | | | aagcggctaagacggctcctggaaagaagaggcctgtagagcagtctcct |
| | | | caggaaccggactcctccgcgggtattggcaaatcgggtgcacagcccgc |
| | | | taaaaagagactcaatttcggtcagactggcgacacagagtcagtcccag |
| | | | accctcaaccaatcggagaacctcccgcagccccctcaggtgtgggatct |
| | | | cttacaatggcttcaggtggtggcgcaccagtggcagacaataacgaagg |
| | | | tgccgatggagtgggtagttcctcgggaaattggcattgcgattcccaat |
| | | | ggctgggggacagagtcatcaccaccagcacccgaacctgggccctgccc |
| | | | acctacaacaatcacctctacaagcaaatctccaacagcacatctggagg |
| | | | atcttcaaatgacaacgcctacttcggctacagcaccccctgggggtatt |
| | | | ttgacttcaacagattccactgccacttctcaccacgtgactggcagcga |
| | | | ctcatcaacaacaactggggattccggcctaagcgactcaacttcaagct |
| | | | cttcaacattcaggtcaaagaggttacggacaacaatggagtcaagacca |
| | | | tcgccaataaccttaccagcacggtccaggtcttcacggactcagactat |
| | | | cagctcccgtacgtgctcgggtcggctcacgagggctgcctcccgccgtt |
| | | | cccagcggacgttttcatgattcctcagtacgggtatctgacgcttaatg |
| | | | atggaagccaggccgtgggtcgttcgtccttttactgcctggaatatttc |
| | | | ccgtcgcaaatgctaagaacgggtaacaacttccagttcagctacgagtt |
| | | | tgagaacgtacctttccatagcagctacgctcacagccaaagcctggacc |
| | | | gactaatgaatccactcatcgaccaatacttgtactatctctcTaGAact |
| | | | attAACGGTTCTGGACAGAATCAAcaaacgctaaaattcagtgtggccgg |
| | | | acccagcaacatggctgtccagggaagaaactacatacctggacccagct |
| | | | accgacaacaacgtgtctcaaccactgtgactcaaaacaacaacagcgaa |
| | | | tttgcttggcctggagcttcttcttgggctctcaatggacgtaatagctt |
| | | | gatgaatcctggacctgctatggccagccacaaagaaggagaggaccgtt |
| | | | tctttcctttgtctggatctttaatttttggcaaacaaggTacCggCaga |
| | | | gacaacgtggatgcggacaaagtcatgataaccaacgaagaagaaattaa |
| | | | aactactaacccggtagcaacggagtcctatggacaagtggccacaaacc |
| | | | accagagtGCTCAGGAAAATCATACTCGCGATAAGGCGCAAGCCCAGacc |
| | | | ggttgggttcaaaaccaaggaatacttccgggtatggtttggcaggacag |
| | | | agatgtgtacctgcaaggacccatttgggccaaaattcctcacacggacg |
| | | | gcaactttcacccttctccgctgatgggagggtttggaatgaagcacccg |
| | | | cctcctcagatcctcatcaaaaacacacctgtacctgcggatcctccaac |
| | | | ggccttcaacaaggacaagctgaactctttcatcacccagtattctactg |
| | | | gccaagtcagcgtggagatcgagtgggagctgcagaaggaaaacagcaag |
| | | | cgctggaacccggagatccagtacacttccaactattacaagtctaataa |
| | | | tgttgaatttgctgttaatactgaaggtgtatatagtgaaccccgcccca |
| | | | ttggcaccagatacctgactcgtaatctg |
| 186 | DNA | Adeno- | atggctgccgatggttatcttccagattggctcgaggacaaccttagtga |
| | | Associated | aggaattcgcgagtggtgggctttgaaacctggagcccctcaacccaagg |
| | | Virus 9 | caaatcaacaacatcaagacaacgctcgaggtcttgtgcttccgggttac |
| | | comprising | aaataccttggacccggcaacggactcgacaagggggagccggtcaacgc |
| | | SEQ | agcagacgcggcggccctcgagcacgacaaggcctacgaccagcagctca |
| | | ID NO: 17 | aggccggagacaacccgtacctcaagtacaaccacgccgacgccgagttc |
| | | | caggagcggctcaaagaagatacgtcttttgggggcaacctcgggcgagc |
| | | | agtcttccaggccaaaaagaggcttcttgaacctcttggtctggttgagg |
| | | | aagggctaagacggctcctggaaagaagaggcctgtagagcagtctcctc |
| | | | aggaaccggactcctccgcgggtattggcaaatcgggtgcacagcccgct |
| | | | aaaaagagactcaatttcggtcagactggcgacacagagtcagtcccaga |
| | | | ccctcaaccaatcggagaacctcccgcagccccctcaggtgtgggatctc |
| | | | ttacaatggcttcaggtggtggcgcaccagtggcagacaataacgaaggt |
| | | | gccgatggagtgggtagttcctcgggaaattggcattgcgattcccaatg |
| | | | gctgggggacagagtcatcaccaccagcacccgaacctgggccctgccca |
| | | | cctacaacaatcacctctacaagcaaatctccaacagcacatctggagga |
| | | | tcttcaaatgacaacgcctacttcggctacagcaccccctgggggtattt |
| | | | tgacttcaacagattccactgccacttctcaccacgtgactggcagcgac |
| | | | tcatcaacaacaactggggattccggcctaagcgactcaacttcaagctc |
| | | | ttcaacattcaggtcaaagaggttacggacaacaatggagtcaagaccat |
| | | | cgccaataaccttaccagcacggtccaggtcttcacggactcagactatc |
| | | | agctcccgtacgtgctcgggtcggctcacgagggctgcctcccgccgttc |
| | | | ccagcggacgttttcatgattctcagtacgggtatctgacgcttaatgat |
| | | | ggaagccaggccgtgggtcgttcgtccttttactgcctggaatatttccc |
| | | | gtcgcaaatgctaagaacgggtaacaacttccagttcagctacgagtttg |
| | | | agaacgtacctttccatagcagctacgctcacagccaaagcctggaccga |
| | | | ctaatgaatccactcatcgaccaatacttgtactatctctcTaGAactat |
| | | | tAACGGTTCTGGACAGAATCAAcaaacgctaaaattcagtgtggccggac |
| | | | ccagcaacatggctgtccagggaagaaactacatacctggacccagctac |
| | | | cgacaacaacgtgtctcaaccactgtgactcaaaacaacaacagcgaatt |
| | | | tgcttggcctggagcttcttcttgggctctcaatggacgtaatagcttga |
| | | | tgaatcctggacctgctatggccagccacaaagaaggagaggaccgtttc |
| | | | tttcctttgtctggatctttaatttttggcaaacaaggTacCggCagaga |
| | | | caacgtggatgcggacaaagtcatgataaccaacgaagaagaaattaaaa |
| | | | ctactaacccggtagcaacggagtcctatggacaagtggccacaaaccac |
| | | | cagagtGCTCAGGAAAACCATACAAGGGACAAGGCGCAGGCGCAGaccgg |
| | | | ttgggttcaaaaccaaggaatacttccgggtatggtttggcaggacagag |
| | | | atgtgtacctgcaaggacccatttgggccaaaattcctcacacggacggc |
| | | | aactttcacccttctccgctgatgggagggtttggaatgaagcacccgcc |
| | | | tcctcagatcctcatcaaaaacacacctgtacctgcggatcctccaacgg |
| | | | ccttcaacaaggacaagctgaactctttcatcacccagtattctactggc |
| | | | caagtcagcgtggagatcgagtgggagctgcagaaggaaaacagcaagcg |
| | | | ctggaacccggagatccagtacacttccaactattacaagtctaataatg |
| | | | ttgaatttgctgttaatactgaaggtgtatatagtgaaccccgccccatt |
| | | | ggcaccagatacctgactcgtaatctg |
| 187 | DNA | Adeno- | atggctgccgatggttatcttccagattggctcgaggacaaccttagtga |
| | | Associated | aggaattcgcgagtggtgggctttgaaacctggagcccctcaacccaagg |
| | | Virus 9 | caaatcaacaacatcaagacaacgctcgaggtcttgtgcttccgggttac |
| | | comprising | aaataccttggacccggcaacggactcgacaagggggagccggtcaacgc |
| | | SEQ | agcagacgcggggccctcgagcacgacaaggcctacgaccagcagctcaa |
| | | ID NO: 17 | ggccggagacaacccgtacctcaagtacaaccacgccgacgccgagttcc |
| | | | aggagcggctcaaagaagatacgtcttttgggggcaacctcgggcgagca |
| | | | gtcttccaggccaaaaagaggcttcttgaacctcttggtctggttgagga |
| | | | agcggctaagacggctcctggaaagaagaggcctgtagagcagtctcctc |
| | | | aggaaccggactcctccgcgggtattggcaaatcgggtgcacagcccgct |
| | | | aaaaagagactcaatttcggtcagactggcgacacagagtcagtcccaga |
| | | | ccctcaaccaatcggagaacctcccgcagccccctcaggtgtgggatctc |
| | | | ttacaatggcttcaggtggtggcgcaccagtggcagacaataacgaaggt |
| | | | gccgatggagtgggtagttcctcgggaaattggcattgcgattcccaatg |
| | | | gctgggggacagagtcatcaccaccagcacccgaacctgggccctgccca |
| | | | cctacaacaatcacctctacaagcaaatctccaacagcacatctggagga |
| | | | tcttcaaatgacaacgcctacttcggctacagcaccccctgggggtattt |
| | | | tgacttcaacagattccactgccacttctcaccacgtgactggcagcgac |
| | | | tcatcaacaacaactggggattccggcctaagcgactcaacttcaagctc |
| | | | ttcaacattcaggtcaaagaggttacggacaacaatggagtcaagaccat |
| | | | cgccaataaccttaccagcacggtccaggtcttcacggactcagactatc |
| | | | agctcccgtacgtgctcgggtcggctcacgagggctgcctcccgccgttc |
| | | | ccagcggacgttttcatgattcctcagtacgggtatctgacgcttaatga |
| | | | tggaagccaggccgtgggtcgttcgtccttttactgcctggaatatttcc |
| | | | cgtcgcaaatgctaagaacgggtaacaacttccagttcagctacgagttt |
| | | | gagaacgtacctttccatagcagctacgctcacagccaaagcctggaccg |
| | | | actaatgaatccactcatcgaccaatacttgtactatctctcTaGAacta |
| | | | ttAACGGTTCTGGACAGAATCAAcaaacgctaaaattcagtgtggccgga |
| | | | cccagcaacatggctgtccagggaagaaactacatacctggacccagcta |
| | | | ccgacaacaacgtgtctcaaccactgtgactcaaaacaacaacagcgaat |
| | | | ttgcttggcctggagcttcttcttgggctctcaatggacgtaatagcttg |
| | | | atgaatcctggacctgctatggccagccacaaagaaggagaggaccgttt |
| | | | ctttcctttgtctggatctttaatttttggcaaacaaggTacCggCagag |
| | | | acaacgtggatgcggacaaagtcatgataaccaacgaagaagaaattaaa |
| | | | actactaacccggtagcaacggagtcctatggacaagtggccacaaacca |
| | | | ccagagtGCCCAAGAGAACCACACGCGAGACAAAGCTCAGGCGCAAaccg |
| | | | gttgggttcaaaaccaaggaatacttccgggtatggtttggcaggacaga |
| | | | gatgtgtacctgcaaggacccatttgggccaaaattcctcacacggacgg |
| | | | caactttcacccttctccgctgatgggagggtttggaatgaagcacccgc |
| | | | ctcctcagatcctcatcaaaaacacacctgtacctgcggatcctccaacg |
| | | | gccttcaacaaggacaagctgaactctttcatcacccagtattctactgg |
| | | | ccaagtcagcgtggagatcgagtgggagctgcagaaggaaaacagcaagc |
| | | | gctggaacccggagatccagtacacttccaactattacaagtctaataat |
| | | | gttgaatttgctgttaatactgaaggtgtatatagtgaaccccgccccat |
| | | | tggcaccagatacctgactcgtaatctg |
| 188 | DNA | Adeno- | atggctgccgatggttatcttccagattggctcgaggacaaccttagtga |
| | | Associated | aggaattcgcgagtggtgggctttgaaacctggagcccctcaacccaagg |
| | | Virus 9 | caaatcaacaacatcaagacaacgctcgaggtcttgtgcttccgggttac |
| | | comprising | aaataccttggacccggcaacggactcgacaagggggagccggtcaacgc |
| | | SEQ | agcagacgcggcggccctcgagcacgacaaggcctacgaccagcagctca |
| | | ID NO: 17 | aggccggagacaacccgtacctcaagtacaaccacgccgacgccgagttc |
| | | | caggagcggctcaaagaagatacgtcttttgggggcaacctcgggcgagc |
| | | | agtcttccaggccaaaaagaggcttcttgaacctcttggtctggttgagg |
| | | | aagcggctaagacggctcctggaaagaagaggcctgtagagcagtctcct |
| | | | caggaaccggactcctccgcgggtattggcaaatcgggtgcacagcccgc |
| | | | taaaaagagactcaatttcggtcagactggcgacacagagtcagtcccag |
| | | | accctcaaccaatcggagaacctcccgcagccccctaggtgtgggatctc |
| | | | ttacaatggcttcaggtggtggcgcaccagtggcagacaataacgaaggt |
| | | | gccgatggagtgggtagttcctcgggaaattggcattgcgattcccaatg |
| | | | gctgggggacagagtcatcaccaccagcacccgaacctgggccctgccca |
| | | | cctacaacaatcacctctacaagcaaatctccaacagcacatctggagga |
| | | | tcttcaaatgacaacgcctacttcggctacagcaccccctgggggtattt |
| | | | tgacttcaacagattccactgccacttctcaccacgtgactggcagcgac |
| | | | tcatcaacaacaactggggattccggcctaagcgactcaacttcaagctc |
| | | | ttcaacattcaggtcaaagaggttacggacaacaatggagtcaagaccat |
| | | | cgccaataaccttaccagcacggtccaggtcttcacggactcagactatc |
| | | | agctcccgtacgtgctcgggtcggctcacgagggctgcctcccgccgttc |
| | | | ccagcggacgttttcatgattcctcagtacgggtatctgacgcttaatga |
| | | | tggaagccaggccgtgggtcgttcgtccttttactgcctggaatatttcc |
| | | | cgtcgcaaatgctaagaacgggtaacaacttccagttcagctacgagttt |
| | | | gagaacgtacctttccatagcagctacgctcacagccaaagcctggaccg |
| | | | actaatgaatccactcatcgaccaatacttgtactatctctcTaGAacta |
| | | | ttAACGGTTCTGGACAGAATCAAcaaacgctaaaattcagtgtggccgga |
| | | | cccagcaacatggctgtccagggaagaaactacatacctggacccagcta |
| | | | ccgacaacaacgtgtctcaaccactgtgactcaaaacaacaacagcgaat |
| | | | ttgcttggcctggagcttcttcttgggctctcaatggacgtaatagcttg |
| | | | atgaatcctggacctgctatggccagccacaaagaaggagaggaccgttt |
| | | | ctttcctttgtctggatctttaatttttggcaaacaaggTacCggCagag |
| | | | acaacgtggatgcggacaaagtcatgataaccaacgaagaagaaattaaa |
| | | | actactaacccggtagcaacggagtcctatggacaagtggccacaaacca |
| | | | ccagagtGCTCAAGAAAATCACACGAGAGACAAGGCCCAAGCGCAAaccg |
| | | | gttgggttcaaaaccaaggaatacttccgggtatggtttggcaggacaga |
| | | | gatgtgtacctgcaaggacccatttgggccaaaattcctcacacggacgg |
| | | | caactttcacccttctccgctgatgggagggtttggaatgaagcacccgc |
| | | | ctcctcagatcctcatcaaaaacacacctgtacctgcggatcctccaacg |
| | | | gccttcaacaaggacaagctgaactctttcatcacccagtattctactgg |
| | | | ccaagtcagcgtggagatcg |
| 189 | DNA | Adeno- | agtgggagctgcagaaggaaaacagcaagcgctggaacccggagatccag |
| | | Associated | tacacttccaactattacaagtctaataatgttgaatttgctgttaatac |
| | | Virus 9 | tgaaggtgtatatagtgaaccccgccccattggcaccagatacctgactc |
| | | comprising | gtaatctgatggctgccgatggttatcttccagattggctcgaggacaac |
| | | SEQ | cttagtgaaggaattcgcgagtggtgggctttgaaacctggagcccctca |
| | | ID NO: 17 | acccaaggcaaatcaacaacatcaagacaacgctcgaggtcttgtgcttc |
| | | | cgggttacaaataccttggacccggcaacggactcgacaagggggagccg |
| | | | gtcaacgcagcagacgcggcggccctcgagcacgacaaggcctacgacca |
| | | | gcagctcaaggccggagacaacccgtacctcaagtacaaccacgccgacg |
| | | | ccgagttccaggagcggctcaaagaagatacgtcttttgggggcaacctc |
| | | | gggcgagcagtcttccaggccaaaaagaggcttcttgaacctcttggtct |
| | | | ggttgaggaagcggctaagacggctcctggaaagaagaggcctgtagagc |
| | | | agtctcctcaggaaccggactcctccgcgggtattggcaaatcgggtgca |
| | | | cagcccgctaaaaagagactcaatttcggtcagactggcgacacagagtc |
| | | | agtcccagaccctcaaccaatcggagaacctcccgcagccccctcaggtg |
| | | | tgggatctcttacaatggcttcaggtggtggcgcaccagtggcagacaat |
| | | | aacgaaggtgccgatggagtgggtagttcctcgggaaattggcattgcga |
| | | | ttcccaatggctgggggacagagtcatcaccaccagcacccgaacctggg |
| | | | ccctgcccacctacaacaatcacctctacaagcaaatctccaacagcaca |
| | | | tctggaggatcttcaaatgacaacgcctacttcggctacagcaccccctg |
| | | | ggggtattttgacttcaacagattccactgccacttctcaccacgtgact |
| | | | ggcagcgactcatcaacaacaactggggattccggcctaagcgactcaac |
| | | | ttcaagctcttcaacattcaggtcaaagaggttacggacaacaatggagt |
| | | | caagaccatcgccaataaccttaccagcacggtccaggtcttcacggact |
| | | | cagactatcagctcccgtacgtgctcgggtcggctcacgagggctgcctc |
| | | | ccgccgttcccagcggacgttttcatgattcctcagtacgggtatctgac |
| | | | gcttaatgatggaagccaggccgtgggtcgttcgtccttttactgcctgg |
| | | | aatatttcccgtcgcaaatgctaagaacgggtaacaacttccagttcagc |
| | | | tacgagtttgagaacgtacctttccatagcagctacgctcacagccaaag |
| | | | cctggaccgactaatgaatccactcatcgaccaatacttgtactatctct |
| | | | cTaGAactattAACGGTTCTGGACAGAATCAAcaaacgctaaaattcagt |
| | | | gtggccggacccagcaacatggctgtccagggaagaaactacatacctgg |
| | | | acccagctaccgacaacaacgtgtctcaaccactgtgactcaaaacaaca |
| | | | acagcgaatttgcttggcctggagcttcttcttgggctctcaatggacgt |
| | | | aatagcttgatgaatcctggacctgctatggccagccacaaagaaggaga |
| | | | ggaccgtttctttcctttgtctggatctttaatttttggcaaacaaggTa |
| | | | cCggCagagacaacgtggatgcggacaaagtcatgataaccaacgaagaa |
| | | | gaaattaaaactactaacccggtagcaacggagtcctatggacaagtggc |
| | | | cacaaaccaccagagtGCTCAAGAAAACCACACGCGAGACAAGGCCCAGG |
| | | | CGCAAaccggttgggttcaaaaccaaggaatacttccgggtatggtttgg |
| | | | caggacagagatgtgtacctgcaaggacccatttgggccaaaattcctca |
| | | | cacggacggcaactttcacccttctccgctgatgggagggtttggaatga |
| | | | agcacccgcctcctcagatcctcatcaaaaacacacctgtacctgcggat |
| | | | cctccaacggccttcaacaaggacaagctgaactctttcatcacccagta |
| | | | ttctactggccaagtcagcgtggagatcgagtgggagctgcagaaggaaa |
| | | | acagcaagcgctggaacccggagatccagtacacttccaactattacaag |
| | | | tctaataatgttgaatttgctgttaatactgaaggtgtatatagtgaacc |
| | | | ccgccccattggcaccagatacctgactcgtaatctg |
| 190 | DNA | Adeno- | atggctgccgatggttatcttccagattggctcgaggacaaccttagtga |
| | | Associated | aggaattcgcgagtggtgggctttgaaacctggagcccctcaacccaagg |
| | | Virus 9 | caaatcaacaacatcaagacaacgctcgaggtcttgtgcttccgggttac |
| | | comprising | aaataccttggacccggcaacggactcgacaagggggagccggtcaacgc |
| | | SEQ | agcagacgcggcggccctcgagcacgacaaggcctacgaccagcagctca |
| | | ID NO: 17 | aggccggagacaacccgtacctcaagtacaaccacgccgacgccgagttc |
| | | | caggagcggctcaaagaagatacgtcttttgggggcaacctcgggcgagc |
| | | | agtcttccaggccaaaaagaggcttcttgaacctcttggtctggttgagg |
| | | | aagcggctaagacggctcctggaaagaagaggcctgtagagcagtctcct |
| | | | caggaaccggactcctccgcgggtattggcaaatcgggtgcacagcccgc |
| | | | taaaaagagactcaatttcggtcagactggcgacacagagtcagtcccag |
| | | | accctcaaccaatcggagaacctcccgcagccccctcaggtgtgggatct |
| | | | cttacaatggcttcaggtggtggcgcaccagtggcagacaataacgaagg |
| | | | tgccgatggagtgggtagttcctcgggaaattggcattgcgattcccaat |
| | | | ggctgggggacagagtcatcaccaccagcacccgaacctgggccctgccc |
| | | | acctacaacaatcacctctacaagcaaatctccaacagcacatctggagg |
| | | | atcttcaaatgacaacgcctacttcggctacagcaccccctgggggtatt |
| | | | ttgacttcaacagattccactgccacttctcaccacgtgactggcagcga |
| | | | ctcatcaacaacaactggggattccggcctaagcgactcaacttcaagct |
| | | | cttcaacattcaggtcaaagaggttacggacaacaatggagtcaagacca |
| | | | tcgccaataaccttaccagcacggtccaggtcttcacggactcagactat |
| | | | cagctcccgtacgtgctcgggtcggctcacgagggctgcctcccgccgtt |
| | | | cccagcggacgttttcatgattcctcagtacgggtatctgacgcttaatg |
| | | | atggaagccaggccgtgggtcgttcgtccttttactgcctggaatatttc |
| | | | ccgtcgcaaatgctaagaacgggtaacaacttccagttcagctacgagtt |
| | | | tgagaacgtacctttccatagcagctacgctcacagccaaagcctggacc |
| | | | gactaatgaatccactcatcgaccaatacttgtactatctctcTaGAact |
| | | | attAACGGTTCTGGACAGAATCAAcaaacgctaaaattcagtgtggccgg |
| | | | acccagcaacatggctgtccagggaagaaactacatacctggacccagct |
| | | | accgacaacaacgtgtctcaaccactgtgactcaaaacaacaacagcgaa |
| | | | tttgcttggcctggagcttcttcttgggctctcaatggacgtaatagctt |
| | | | gatgaatcctggacctgctatggccagccacaaagaaggagaggaccgtt |
| | | | tctttcctttgtctggatctttaatttttggcaaacaaggTacCggCaga |
| | | | gacaacgtggatgcggacaaagtcatgataaccaacgaagaagaaattaa |
| | | | aactactaacccggtagcaacggagtcctatggacaagtggccacaaacc |
| | | | accagagtGCTCAGGAGAATCATACCCGGGACAAGGCGCAGGCCCAGacc |
| | | | ggttgggttcaaaaccaaggaatacttccgggtatggtttggcaggacag |
| | | | agatgtgtacctgcaaggacccatttgggccaaaattcctcacacggacg |
| | | | gcaactttcacccttctccgctgatgggagggtttggaatgaagcacccg |
| | | | cctcctcagatcctcatcaaaaacacacctgtacctgcggatcctccaac |
| | | | ggccttcaacaaggacaagctgaactctttcatcacccagtattctactg |
| | | | gccaagtcagcgtggagatcgagtgggagctgcagaaggaaaacagcaag |
| | | | cgctggaacccggagatccagtacacttccaactattacaagtctaataa |
| | | | tgttgaatttgctgttaatactgaaggtgtatatagtgaaccccgcccca |
| | | | ttggcaccagatacctgactcgtaatctg |
| 191 | DNA | Adeno- | atggctgccgatggttatcttccagattggctcgaggacaaccttagtga |
| | | Associated | aggaattcgcgagtggtgggctttgaaacctggagcccctcaacccaagg |
| | | Virus 9 | caaatcaacaacatcaagacaacgctcgaggtcttgtgcttccgggttac |
| | | comprising | aaataccttggacccggcaacggactcgacaagggggagccggtcaacgc |
| | | SEQ | agcagacgcggcggccctcgagcacgacaaggcctacgaccagcagctca |
| | | ID NO: 18 | aggccggagacaacccgtacctcaagtacaaccacgccgacgccgagttc |
| | | | caggagcggctcaaagaagatacgtcttttgggggcaacctcgggcgagc |
| | | | agtcttccaggccaaaaagaggcttcttgaacctcttggtctggttgagg |
| | | | aagcggctaagacggctcctggaaagaagaggcctgtagagcagtctcct |
| | | | caggaaccggactcctccgcgggtattggcaaatcgggtgcacagcccgc |
| | | | taaaaagagactcaatttcggtcagactggcgacacagagtcagtcccag |
| | | | accctcaaccaatcggagaacctcccgcagccccctcaggtgtgggatct |
| | | | cttacaatggcttcaggtggtggcgcaccagtggcagacaataacgaagg |
| | | | tgccgatggagtgggtagttcctcgggaaattggcattgcgattcccaat |
| | | | ggctgggggacagagtcatcaccaccagcacccgaacctgggccctgccc |
| | | | acctacaacaatcacctctacaagcaaatctccaacagcacatctggagg |
| | | | atcttcaaatgacaacgcctacttcggctacagcaccccctgggggtatt |
| | | | ttgacttcaacagattccactgccacttctcaccacgtgactggcagcga |
| | | | ctcatcaacaacaactggggattccggcctaagcgactcaacttcaagct |
| | | | cttcaacattcaggtcaaagaggttacggacaacaatggagtcaagacca |
| | | | tcgccaataaccttaccagcacggtccaggtcttcacggactcagactat |
| | | | cagctcccgtacgtgctcgggtcggctcacgagggctgcctcccgccgtt |
| | | | cccagcggacgttttcatgattcctcagtacgggtatctgacgcttaatg |
| | | | atggaagccaggccgtgggtcgttcgtccttttactgcctggaatatttc |
| | | | ccgtcgcaaatgctaagaacgggtaacaacttccagttcagctacgagtt |
| | | | tgagaacgtacctttccatagcagctacgctcacagccaaagcctggacc |
| | | | gactaatgaatccactcatcgaccaatacttgtactatctctcTaGAact |
| | | | attAACGGTTCTGGACAGAATCAAcaaacgctaaaattcagtgtggccgg |
| | | | acccagcaacatggctgtccagggaagaaactacatacctggacccagct |
| | | | accgacaacaacgtgtctcaaccactgtgactcaaaacaacaacagcgaa |
| | | | tttgcttggcctggagcttcttcttgggctctcaatggacgtaatagctt |
| | | | gatgaatcctggacctgctatggccagccacaaagaaggagaggaccgtt |
| | | | tctttcctttgtctggatctttaatttttggcaaacaaggTacCggCaga |
| | | | gacaacgtggatgcggacaaagtcatgataaccaacgaagaagaaattaa |
| | | | aactactaacccggtagcaacggagtcctatggacaagtggccacaaacc |
| | | | accagagtGCGCAGGGAAACGATACGAGATCCACGGCGCAAGCACAGacc |
| | | | ggttgggttcaaaaccaaggaatacttccgggtatggtttggcaggacag |
| | | | agatgtgtacctgcaaggacccatttgggccaaaattcctcacacggacg |
| | | | gcaactttcacccttctccgctgatgggagggtttggaatgaagcacccg |
| | | | cctcctcagatcctcatcaaaaacacacctgtacctgcggatcctccaac |
| | | | ggccttcaacaaggacaagctgaactctttcatcacccagtattctactg |
| | | | gccaagtcagcgtggagatcgagtgggagctgcagaaggaaaacagcaag |
| | | | cgctggaacccggagatccagtacacttccaactattacaagtctaataa |
| | | | tgttgaatttgctgttaatactgaaggtgtatatagtgaaccccgcccca |
| | | | ttggcaccagatacctgactcgtaatctg |
| 192 | DNA | Adeno- | atggctgccgatggttatcttccagattggctcgaggacaaccttagtga |
| | | Associated | aggaattcgcgagtggtgggctttgaaacctggagcccctcaacccaagg |
| | | Virus 9 | caaatcaacaacatcaagacaacgctcgaggtcttgtgcttccgggttac |
| | | comprising | aaataccttggacccggcaacggactcgacaagggggagccggtcaacgc |
| | | SEQ | agcagacgcggcggccctcgagcacgacaaggcctacgaccagcagctca |
| | | ID NO: 18 | aggccggagacaacccgtacctcaagtacaaccacgccgacgccgagttc |
| | | | caggagcggctcaaagaagatacgtcttttgggggcaacctcgggcgagc |
| | | | agtcttccaggccaaaaagaggcttcttgaacctcttggtctggttgagg |
| | | | aagcggctaagacggctcctggaaagaagaggcctgtagagcagtctcct |
| | | | caggaaccggactcctccgcgggtattggcaaatcgggtgcacagcccgc |
| | | | taaaaagagactcaatttcggtcagactggcgacacagagtcagtcccag |
| | | | accctcaaccaatcggagaacctcccgcagccccctcaggtgtgggatct |
| | | | cttacaatggcttcaggtggtggcgcaccagtggcagacaataacgaagg |
| | | | tgccgatggagtgggtagttcctcgggaaattggcattgcgattcccaat |
| | | | ggctgggggacagagtcatcaccaccagcacccgaacctgggccctgccc |
| | | | acctacaacaatcacctctacaagcaaatctccaacagcacatctggagg |
| | | | atcttcaaatgacaacgcctacttcggctacagcaccccctgggggtatt |
| | | | ttgacttcaacagattccactgccacttctcaccacgtgactggcagcga |
| | | | ctcatcaacaacaactggggattccggcctaagcgactcaacttcaagct |
| | | | cttcaacattcaggtcaaagaggttacggacaacaatggagtcaagacca |
| | | | tcgccaataaccttaccagcacggtccaggtcttcacggactcagactat |
| | | | cagctcccgtacgtgctcgggtcggctcacgagggctgcctcccgccgtt |
| | | | cccagcggacgttttcatgattcctcagtacgggtatctgacgcttaatg |
| | | | atggaagccaggccgtgggtcgttcgtccttttactgcctggaatatttc |
| | | | ccgtcgcaaatgctaagaacgggtaacaacttccagttcagctacgagtt |
| | | | tgagaacgtacctttccatagcagctacgctcacagccaaagcctggacc |
| | | | gactaatgaatccactcatcgaccaatacttgtactatctctcTaGAact |
| | | | attAACGGTTCTGGACAGAATCAAcaaacgctaaaattcagtgtggccgg |
| | | | acccagcaacatggctgtccagggaagaaactacatacctggacccagct |
| | | | accgacaacaacgtgtctcaaccactgtgactcaaaacaacaacagcgaa |
| | | | tttgcttggcctggagcttcttcttgggctctcaatggacgtaatagctt |
| | | | gatgaatcctggacctgctatggccagccacaaagaaggagaggaccgtt |
| | | | tctttcctttgtctggatctttaatttttggcaaacaaggTacCggCaga |
| | | | gacaacgtggatgcggacaaagtcatgataaccaacgaagaagaaattaa |
| | | | aactactaacccggtagcaacggagtcctatggacaagtggccacaaacc |
| | | | accagagtGCCCAGGGAAACGACACACGTTCGACCGCACAGGCACAGacc |
| | | | ggttgggttcaaaaccaaggaatacttccgggtatggtttggcaggacag |
| | | | agatgtgtacctgcaaggacccatttgggccaaaattcctcacacggacg |
| | | | gcaactttcacccttctccgctgatgggagggtttggaatgaagcacccg |
| | | | cctcctcagatcctcatcaaaaacacacctgtacctgcggatcctccaac |
| | | | ggccttcaacaaggacaagctgaactctttcatcacccagtattctactg |
| | | | gccaagtcagcgtggagatcgagtgggagctgcagaaggaaaacagcaag |
| | | | cgctggaacccggagatccagtacacttccaactattacaagtctaataa |
| | | | tgttgaatttgctgttaatactgaaggtgtatatagtgaaccccgcccca |
| | | | ttggcaccagatacctgactcgtaatctg |
| 193 | DNA | Adeno- | atggctgccgatggttatcttccagattggctcgaggacaaccttagtga |
| | | Associated | aggaattcgcgagtggtgggctttgaaacctggagcccctcaacccaagg |
| | | Virus 9 | caaatcaacaacatcaagacaacgctcgaggtcttgtgcttccgggttac |
| | | comprising | aaataccttggacccggcaacggactcgacaagggggagccggtcaacgc |
| | | SEQ | agcagacgcggcggccctcgagcacgacaaggcctacgaccagcagctca |
| | | ID NO: 18 | aggccggagacaacccgtacctcaagtacaaccacgccgacgccgagttc |
| | | | caggagcggctcaaagaagatacgtcttttgggggcaacctcgggcgagc |
| | | | agtcttccaggccaaaaagaggcttcttgaacctcttggtctggttgagg |
| | | | aagcggctaagacggctcctggaaagaagaggcctgtagagcagtctcct |
| | | | caggaaccggactcctccgcgggtattggcaaatcgggtgcacagcccgc |
| | | | taaaaagagactcaatttcggtcagactggcgacacagagtcagtcccag |
| | | | accctcaaccaatcggagaacctcccgcagccccctcaggtgtgggatct |
| | | | cttacaatggcttcaggtggtggcgcaccagtggcagacaataacgaagg |
| | | | tgccgatggagtgggtagttcctcgggaaattggcattgcgattcccaat |
| | | | ggctgggggacagagtcatcaccaccagcacccgaacctgggccctgccc |
| | | | acctacaacaatcacctctacaagcaaatctccaacagcacatctggagg |
| | | | atcttcaaatgacaacgcctacttcggctacagcaccccctgggggtatt |
| | | | ttgacttcaacagattccactgccacttctcaccacgtgactggcagcga |
| | | | ctcatcaacaacaactggggattccggcctaagcgactcaacttcaagct |
| | | | cttcaacattcaggtcaaagaggttacggacaacaatggagtcaagacca |
| | | | tcgccaataaccttaccagcacggtccaggtcttcacggactcagactat |
| | | | cagctcccgtacgtgctcgggtcggctcacgagggctgcctcccgccgtt |
| | | | cccagcggacgttttcatgattcctcagtacgggtatctgacgcttaatg |
| | | | atggaagccaggccgtgggtcgttcgtccttttactgcctggaatatttc |
| | | | ccgtcgcaaatgctaagaacgggtaacaacttccagttcagctacgagtt |
| | | | tgagaacgtacctttccatagcagctacgctcacagccaaagcctggacc |
| | | | gactaatgaatccactcatcgaccaatacttgtactatctctcTaGAact |
| | | | attAACGGTTCTGGACAGAATCAAcaaacgctaaaattcagtgtggccgg |
| | | | acccagcaacatggctgtccagggaagaaactacatacctggacccagct |
| | | | accgacaacaacgtgtctcaaccactgtgactcaaaacaacaacagcgaa |
| | | | tttgcttggcctggagcttcttcttgggctctcaatggacgtaatagctt |
| | | | gatgaatcctggacctgctatggccagccacaaagaaggagaggaccgtt |
| | | | tctttcctttgtctggatctttaatttttggcaaacaaggTacCggCaga |
| | | | gacaacgtggatgcggacaaagtcatgataaccaacgaagaagaaattaa |
| | | | aactactaacccggtagcaacggagtcctatggacaagtggccacaaacc |
| | | | accagagtGCTCAAGGTAATGATACTCGTTCCACGGCACAAGCCCAAacc |
| | | | ggttgggttcaaaaccaaggaatacttccgggtatggtttggcaggacag |
| | | | agatgtgtacctgcaaggacccatttgggccaaaattcctcacacggacg |
| | | | gcaactttcacccttctccgctgatgggagggtttggaatgaagcacccg |
| | | | cctcctcagatcctcatcaaaaacacacctgtacctgcggatcctccaac |
| | | | ggccttcaacaaggacaagctgaactctttcatcacccagtattctactg |
| | | | gccaagtcagcgtggagatcgagtgggagctgcagaaggaaaacagcaag |
| | | | cgctggaacccggagatccagtacacttccaactattacaagtctaataa |
| | | | tgttgaatttgctgttaatactgaaggtgtatatagtgaaccccgcccca |
| | | | ttggcaccagatacctgactcgtaatctg |
| 194 | DNA | Adeno- | atggctgccgatggttatcttccagattggctcgaggacaaccttagtga |
| | | Associated | aggaattcgcgagtggtgggctttgaaacctggagcccctcaacccaagg |
| | | Virus 9 | caaatcaacaacatcaagacaacgctcgaggtcttgtgcttccgggttac |
| | | comprising | aaataccttggacccggcaacggactcgacaagggggagccggtcaacgc |
| | | SEQ | agcagacgcggcggccctcgagcacgacaaggcctacgaccagcagctca |
| | | ID NO: 18 | aggccggagacaacccgtacctcaagtacaaccacgccgacgccgagttc |
| | | | caggagcggctcaaagaagatacgtcttttgggggcaacctggggagcag |
| | | | tcttccaggccaaaaagaggcttcttgaacctcttggtctggttgaggaa |
| | | | gcggctaagacggctcctggaaagaagaggcctgtagagcagtctcctca |
| | | | ggaaccggactcctccgcgggtattggcaaatcgggtgcacagcccgcta |
| | | | aaaagagactcaatttcggtcagactggcgacacagagtcagtcccagac |
| | | | cctcaaccaatcggagaacctcccgcagccccctcaggtgtgggatctct |
| | | | tacaatggcttcaggtggtggcgcaccagtggcagacaataacgaaggtg |
| | | | ccgatggagtgggtagttcctcgggaaattggcattgcgattcccaatgg |
| | | | ctgggggacagagtcatcaccaccagcacccgaacctgggccctgcccac |
| | | | ctacaacaatcacctctacaagcaaatctccaacagcacatctggaggat |
| | | | cttcaaatgacaacgcctacttcggctacagcaccccctgggggtatttt |
| | | | gacttcaacagattccactgccacttctcaccacgtgactggcagcgact |
| | | | catcaacaacaactggggattccggcctaagcgactcaacttcaagctct |
| | | | tcaacattcaggtcaaagaggttacggacaacaatggagtcaagaccatc |
| | | | gccaataaccttaccagcacggtccaggtcttcacggactcagactatca |
| | | | gctcccgtacgtgctcgggtcggctcacgagggctgcctcccgccgttcc |
| | | | cagcggacgttttcatgattcctcagtacgggtatctgacgcttaatgat |
| | | | ggaagccaggccgtgggtcgttcgtccttttactgcctggaatatttccc |
| | | | gtcgcaaatgctaagaacgggtaacaacttccagttcagctacgagtttg |
| | | | agaacgtacctttccatagcagctacgctcacagccaaagcctggaccga |
| | | | ctaatgaatccactcatcgaccaatacttgtactatctctcTaGAactat |
| | | | tAACGGTTCTGGACAGAATCAAcaaacgctaaaattcagtgtggccggac |
| | | | ccagcaacatggctgtccagggaagaaactacatacctggacccagctac |
| | | | cgacaacaacgtgtctcaaccactgtgactcaaaacaacaacagcgaatt |
| | | | tgcttggcctggagcttcttcttgggctctcaatggacgtaatagcttga |
| | | | tgaatcctggacctgctatggccagccacaaagaaggagaggaccgtttc |
| | | | tttcctttgtctggatctttaatttttggcaaacaaggTacCggCagaga |
| | | | caacgtggatgcggacaaagtcatgataaccaacgaagaagaaattaaaa |
| | | | ctactaacccggtagcaacggagtcctatggacaagtggccacaaaccac |
| | | | cagagtGCACAGGGTAACGATACGCGAAGCACAGCTCAAGCACAAaccgg |
| | | | ttgggttcaaaaccaaggaatacttccgggtatggtttggcaggacagag |
| | | | atgtgtacctgcaaggacccatttgggccaaaattcctcacacggacggc |
| | | | aactttcacccttctccgctgatgggagggtttggaatgaagcacccgcc |
| | | | tcctcagatcctcatcaaaaacacacctgtacctgcggatcctccaacgg |
| | | | ccttcaacaaggacaagctgaactctttcatcacccagtattctactggc |
| | | | caagtcagcgtggagatcgagtgggagctgcagaaggaaaacagcaagcg |
| | | | ctggaacccggagatccagtacacttccaactattacaagtctaataatg |
| | | | ttgaatttgctgttaatactgaaggtgtatatagtgaaccccgccccatt |
| | | | ggcaccagatacctgactcgtaatctg |
| 195 | DNA | Adeno- | atggctgccgatggttatcttccagattggctcgaggacaaccttagtga |
| | | Associated | aggaattcgcgagtggtgggctttgaaacctggagcccctcaacccaagg |
| | | Virus 9 | caaatcaacaacatcaagacaacgctcgaggtcttgtgcttccgggttac |
| | | comprising | aaataccttggacccggcaacggactcgacaagggggagccggtcaacgc |
| | | SEQ | agcagacgcggcggccctcgagcacgacaaggcctacgaccagcagctca |
| | | ID NO: 18 | aggccggagacaacccgtacctcaagtacaaccacgccgacgccgagttc |
| | | | caggagcggctcaaagaagatacgtcttttgggggcaacctcgggcgagc |
| | | | agtcttccaggccaaaaagaggcttcttgaacctcttggtctggttgagg |
| | | | aagcggctaagacggctcctggaaagaagaggcctgtagagcagtctcct |
| | | | caggaaccggactcctccgcgggtattggcaaatcgggtgcacagcccgc |
| | | | taaaaagagactcaatttcggtcagactggcgacacagagtcagtcccag |
| | | | accctcaaccaatcggagaacctcccgcagccccctcaggtgtgggatct |
| | | | cttacaatggcttcaggtggtggcgcaccagtggcagacaataacgaagg |
| | | | tgccgatggagtgggtagttcctcgggaaattggcattgcgattcccaat |
| | | | ggctgggggacagagtcatcaccaccagcacccgaacctgggccctgccc |
| | | | acctacaacaatcacctctacaagcaaatctccaacagcacatctggagg |
| | | | atcttcaaatgacaacgcctacttcggctacagcaccccctgggggtatt |
| | | | ttgacttcaacagattccactgccacttctcaccacgtgactggcagcga |
| | | | ctcatcaacaacaactggggattccggcctaagcgactcaacttcaagct |
| | | | cttcaacattcaggtcaaagaggttacggacaacaatggagtcaagacca |
| | | | tcgccaataaccttaccagcacggtccaggtcttcacggactcagactat |
| | | | cagctcccgtacgtgctcgggtcggctcacgagggctgcctcccgccgtt |
| | | | cccagcggacgttttcatgattcctcagtacgggtatctgacgcttaatg |
| | | | atggaagccaggccgtgggtcgttcgtccttttactgcctggaatatttc |
| | | | ccgtcgcaaatgctaagaacgggtaacaacttccagttcagctacgagtt |
| | | | tgagaacgtacctttccatagcagctacgctcacagccaaagcctggacc |
| | | | gactaatgaatccactcatcgaccaatacttgtactatctctcTaGAact |
| | | | attAACGGTTCTGGACAGAATCAAcaaacgctaaaattcagtgtggccgg |
| | | | acccagcaacatggctgtccagggaagaaactacatacctggacccagct |
| | | | accgacaacaacgtgtctcaaccactgtgactcaaaacaacaacagcgaa |
| | | | tttgcttggcctggagcttcttcttgggctctcaatggacgtaatagctt |
| | | | gatgaatcctggacctgctatggccagccacaaagaaggagaggaccgtt |
| | | | tctttcctttgtctggatctttaatttttggcaaacaaggTacCggCaga |
| | | | gacaacgtggatgcggacaaagtcatgataaccaacgaagaagaaattaa |
| | | | aactactaacccggtagcaacggagtcctatggacaagtggccacaaacc |
| | | | accagagtGCACAGGGTAACGATACGCGGTCCACAGCACAGGCACAGacc |
| | | | ggttgggttcaaaaccaaggaatacttccgggtatggtttggcaggacag |
| | | | agatgtgtacctgcaaggacccatttgggccaaaattcctcacacggacg |
| | | | gcaactttcacccttctccgctgatgggagggtttggaatgaagcacccg |
| | | | cctcctcagatcctcatcaaaaacacacctgtacctgcggatcctccaac |
| | | | ggccttcaacaaggacaagctgaactctttcatcacccagtattctactg |
| | | | gccaagtcagcgtggagatcgagtgggagctgcagaaggaaaacagcaag |
| | | | cgctggaacccggagatccagtacacttccaactattacaagtctaataa |
| | | | tgttgaatttgctgttaatactgaaggtgtatatagtgaaccccgcccca |
| | | | ttggcaccagatacctgactcgtaatctg |
| 196 | DNA | Adeno- | atggctgccgatggttatcttccagattggctcgaggacaaccttagtga |
| | | Associated | aggaattcgcgagtggtgggctttgaaacctggagcccctcaacccaagg |
| | | Virus 9 | caaatcaacaacatcaagacaacgctcgaggtcttgtgcttccgggttac |
| | | comprising | aaataccttggacccggcaacggactcgacaagggggagccggtcaacgc |
| | | SEQ | agcagacgcggcggccctcgagcacgacaaggcctacgaccagcagctca |
| | | ID NO: 18 | aggrcggagacaacccgtacctcaagtacaaccacgccgacgccgagttc |
| | | | caggagcggctcaaagaagatacgtcttttgggggcaacctcgggcgagc |
| | | | agtcttccaggccaaaaagaggcttcttgaacctcttggtctggttgagg |
| | | | aagcggctaagacggctcctggaaagaagaggcctgtagagcagtctcct |
| | | | caggaaccggactcctccgcgggtattggcaaatcgggtgcacagcccgc |
| | | | taaaaagagactcaatttcggtcagactggcgacacagagtcagtcccag |
| | | | accctcaaccaatcggagaacctcccgcagccccctcaggtgtgggatct |
| | | | cttacaatggcttcaggtggtggcgcaccagtggcagacaataacgaagg |
| | | | tgccgatggagtgggtagttcctcgggaaattggcattgcgattcccaat |
| | | | ggctgggggacagagtcatcaccaccagcacccgaacctgggccctgccc |
| | | | acctacaacaatcacctctacaagcaaatctccaacagcacatctggagg |
| | | | atcttcaaatgacaacgcctacttcggctacagcaccccctgggggtatt |
| | | | ttgacttcaacagattccactgccacttctcaccacgtgactggcagcga |
| | | | ctcatcaacaacaactggggattccggcctaagcgactcaacttcaagct |
| | | | cttcaacattcaggtcaaagaggttacggacaacaatggagtcaagacca |
| | | | tcgccaataaccttaccagcacggtccaggtcttcacggactcagactat |
| | | | cagctcccgtacgtgctcgggtcggctcacgagggctgcctcccgccgtt |
| | | | cccagcggacgttttcatgattcctcagtacgggtatctgacgcttaatg |
| | | | atggaagccaggccgtgggtcgttcgtccttttactgcctggaatatttc |
| | | | ccgtcgcaaatgctaagaacgggtaacaacttccagttcagctacgagtt |
| | | | tgagaacgtacctttccatagcagctacgctcacagccaaagcctggacc |
| | | | gactaatgaatccactcatcgaccaatacttgtactatctctcTaGAact |
| | | | attAACGGTTCTGGACAGAATCAAcaaacgctaaaattcagtgtggccgg |
| | | | acccagcaacatggctgtccagggaagaaactacatacctggacccagct |
| | | | accgacaacaacgtgtctcaaccactgtgactcaaaacaacaacagcgaa |
| | | | tttgcttggcctggagcttcttcttgggctctcaatggacgtaatagctt |
| | | | gatgaatcctggacctgctatggccagccacaaagaaggagaggaccgtt |
| | | | tctttcctttgtctggatctttaatttttggcaaacaaggTacCggCaga |
| | | | gacaacgtggatgcggacaaagtcatgataaccaacgaagaagaaattaa |
| | | | aactactaacccggtagcaacggagtcctatggacaagtggccacaaacc |
| | | | accagagtGCTCAAGGGAATGATACGAGAAGTACTGCTCAAGCGCAAacc |
| | | | ggttgggttcaaaaccaaggaatacttccgggtatggtttggcaggacag |
| | | | agatgtgtacctgcaaggacccatttgggccaaaattcctcacacggacg |
| | | | gcaactttcacccttctccgctgatgggagggtttggaatgaagcacccg |
| | | | cctcctcagatcctcatcaaaaacacacctgtacctgcggatcctccaac |
| | | | ggccttcaacaaggacaagctgaactctttcatcacccagtattctactg |
| | | | gccaagtcagcgtggagatcgagtgggagctgcagaaggaaaacagcaag |
| | | | cgctggaacccggagatccagtacacttccaactattacaagtctaataa |
| | | | tgttgaatttgctgttaatactgaaggtgtatatagtgaaccccgcccca |
| | | | ttggcaccagatacctgactcgtaatctg |
| 197 | DNA | Adeno- | atggctgccgatggttatcttccagattggctcgaggacaaccttagtga |
| | | Associated | aggaattcgcgagtggtgggctttgaaacctggagcccctcaacccaagg |
| | | Virus 9 | caaatcaacaacatcaagacaacgctcgaggtcttgtgcttccgggttac |
| | | comprising | aaataccttggacccggcaacggactcgacaagggggagccggtcaacgc |
| | | SEQ | agcagacgcggcggccctcgagcacgacaaggcctacgaccagcagctca |
| | | ID NO: 18 | aggccggagacaacccgtacctcaagtacaaccacgccgacgccgagttc |
| | | | caggagcggctcaaagaagatacgtcttttgggggcaacctcgggcgagc |
| | | | agtcttccaggccaaaaagaggcttcttgaacctcttggtctggttgagg |
| | | | aagcggctaagacggctcctggaaagaagaggcctgtagagcagtctcct |
| | | | caggaaccggactcctccgcgggtattggcaaatcgggtgcacagcccgc |
| | | | taaaaagagactcaatttcggtcagactggcgacacagagtcagtcccag |
| | | | accctcaaccaatcggagaacctcccgcagccccctcaggtgtgggatct |
| | | | cttacaatggcttcaggtggtggcgcaccagtggcagacaataacgaagg |
| | | | tgccgatggagtgggtagttcctcgggaaattggcattgcgattcccaat |
| | | | ggctgggggacagagtcatcaccaccagcacccgaacctgggccctgccc |
| | | | acctacaacaatcacctctacaagcaaatctccaacagcacatctggagg |
| | | | atcttcaaatgacaacgcctacttcggctacagcaccccctgggggtatt |
| | | | ttgacttcaacagattccactgccacttctcaccacgtgactggcagcga |
| | | | ctcatcaacaacaactggggattccggcctaagcgactcaacttcaagct |
| | | | cttcaacattcaggtcaaagaggttacggacaacaatggagtcaagacca |
| | | | tcgccaataaccttaccagcacggtccaggtcttcacggactcagactat |
| | | | cagctcccgtacgtgctcgggtcggctcacgagggctgcctcccgccgtt |
| | | | cccagcggacgttttcatgattcctcagtacgggtatctgacgcttaatg |
| | | | atggaagccaggccgtgggtcgttcgtccttttactgcctggaatatttc |
| | | | ccgtcgcaaatgctaagaacgggtaacaacttccagttcagctacgagtt |
| | | | tgagaacgtacctttccatagcagctacgctcacagccaaagcctggacc |
| | | | gactaatgaatccactcatcgaccaatacttgtactatctctcTaGAact |
| | | | attAACGGTTCTGGACAGAATCAAcaaacgctaaaattcagtgtggccgg |
| | | | acccagcaacatggctgtccagggaagaaactacatacctggacccagct |
| | | | accgacaacaacgtgtctcaaccactgtgactcaaaacaacaacagcgaa |
| | | | tttgcttggcctggagcttcttcttgggctctcaatggacgtaatagctt |
| | | | gatgaatcctggacctgctatggccagccacaaagaaggagaggaccgtt |
| | | | tctttcctttgtctggatctttaatttttggcaaacaaggTacCggCaga |
| | | | gacaacgtggatgcggacaaagtcatgataaccaacgaagaagaaattaa |
| | | | aactactaacccggtagcaacggagtcctatggacaagtggccacaaacc |
| | | | accagagtGCCCAGGGAAACGACACCAGGAGCACAGCTCAGGCACAGacc |
| | | | ggttgggttcaaaaccaaggaatacttccgggtatggtttggcaggacag |
| | | | agatgtgtacctgcaaggacccatttgggccaaaattcctcacacggacg |
| | | | gcaactttcacccttctccgctgatgggagggtttggaatgaagcacccg |
| | | | cctcctcagatcctcatcaaaaacacacctgtacctgcggatcctccaac |
| | | | ggccttcaacaaggacaagctgaactctttcatcacccagtattctactg |
| | | | gccaagtcagcgtggagatcgagtgggagctgcagaaggaaaacagcaag |
| | | | cgctggaacccggagatccagtacacttccaactattacaagtctaataa |
| | | | tgttgaatttgctgttaatactgaaggtgtatatagtgaaccccgcccca |
| | | | ttggcaccagatacctgactcgtaatctg |
| 198 | DNA | Adeno- | atggctgccgatggttatcttccagattggctcgaggacaaccttagtga |
| | | Associated | aggaattcgcgagtggtgggctttgaaacctggagcccctcaacccaagg |
| | | Virus 9 | caaatcaacaacatcaagacaacgctcgaggtcttgtgcttccgggttac |
| | | comprising | aaataccttggacccggcaacggactcgacaagggggagccggtcaacgc |
| | | SEQ | agcagacgcggggccctcgagcacgacaaggcctacgaccagcagctcaa |
| | | ID NO: 18 | ggccggagacaacccgtacctcaagtacaaccacgccgacgccgagttcc |
| | | | aggagcggctcaaagaagatacgtcttttgggggcaacctcgggcgagca |
| | | | gtcttccaggccaaaaagaggcttcttgaacctcttggtctggttgagga |
| | | | agcggctaagacggctcctggaaagaagaggcctgtagagcagtctcctc |
| | | | aggaaccggactcctccgcgggtattggcaaatcgggtgcacagcccgct |
| | | | aaaaagagactcaatttcggtcagactggcgacacagagtcagtcccaga |
| | | | ccctcaaccaatcggagaacctcccgcagccccctcaggtgtgggatctc |
| | | | ttacaatggcttcaggtggtggcgcaccagtggcagacaataacgaaggt |
| | | | gccgatggagtgggtagttcctcgggaaattggcattgcgattcccaatg |
| | | | gctgggggacagagtcatcaccaccagcacccgaacctgggccctgccca |
| | | | cctacaacaatcacctctacaagcaaatctccaacagcacatctggagga |
| | | | tcttcaaatgacaacgcctacttcggctacagcaccccctgggggtattt |
| | | | tgacttcaacagattccactgccacttctcaccacgtgactggcagcgac |
| | | | tcatcaacaacaactggggattccggcctaagcgactcaacttcaagctc |
| | | | ttcaacattcaggtcaaagaggttacggacaacaatggagtcaagaccat |
| | | | cgccaataaccttaccagcacggtccaggtcttcacggactcagactatc |
| | | | agctcccgtacgtgctcgggtcggctcacgagggctgcctcccgccgttc |
| | | | ccagcggacgttttcatgattcctcagtacgggtatctgacgcttaatga |
| | | | tggaagccaggccgtgggtcgttcgtccttttactgcctggaatatttcc |
| | | | cgtcgcaaatgctaagaacgggtaacaacttccagttcagctacgagttt |
| | | | gagaacgtacctttccatagcagctacgctcacagccaaagcctggaccg |
| | | | actaatgaatccactcatcgaccaatacttgtactatctctcTaGAacta |
| | | | ttAACGGTTCTGGACAGAATCAAcaaacgctaaaattcagtgtggccgga |
| | | | cccagcaacatggctgtccagggaagaaactacatacctggacccagcta |
| | | | ccgacaacaacgtgtctcaaccactgtgactcaaaacaacaacagcgaat |
| | | | ttgcttggcctggagcttcttcttgggctctcaatggacgtaatagcttg |
| | | | atgaatcctggacctgctatggccagccacaaagaaggagaggaccgttt |
| | | | ctttcctttgtctggatctttaatttttggcaaacaaggTacCggCagag |
| | | | acaacgtggatgcggacaaagtcatgataaccaacgaagaagaaattaaa |
| | | | actactaacccggtagcaacggagtcctatggacaagtggccacaaacca |
| | | | ccagagtGCGCAAGGAAATGACACTCGATCGACGGCGCAAGCTCAAaccg |
| | | | gttgggttcaaaaccaaggaatacttccgggtatggtttggcaggacaga |
| | | | gatgtgtacctgcaaggacccatttgggccaaaattcctcacacggacgg |
| | | | caactttcacccttctccgctgatgggagggtttggaatgaagcacccgc |
| | | | ctcctcagatcctcatcaaaaacacacctgtacctgcggatcctccaacg |
| | | | gccttcaacaaggacaagctgaactctttcatcacccagtattctactgg |
| | | | ccaagtcagcgtggagatcgagtgggagctgcagaaggaaaacagcaagc |
| | | | gctggaacccggagatccagtacacttccaactattacaagtctaataat |
| | | | gttgaatttgctgttaatactgaaggtgtatatagtgaaccccgccccat |
| | | | tggcaccagatacctgactcgtaatctg |
| 199 | DNA | Adeno- | atggctgccgatggttatcttccagattggctcgaggacaaccttagtga |
| | | Associated | aggaattcgcgagtggtgggctttgaaacctggagcccctcaacccaagg |
| | | Virus 9 | caaatcaacaacatcaagacaacgctcgaggtcttgtgcttccgggttac |
| | | comprising | aaataccttggacccggcaacggactcgacaagggggagccggtcaacgc |
| | | SEQ | agcagacgcggcggccctcgagcacgacaaggcctacgaccagcagctca |
| | | ID NO: 18 | aggccggagacaacccgtacctcaagtacaaccacgccgacgccgagttc |
| | | | caggagcggctcaaagaagatacgtcttttgggggcaacctcgggcgagc |
| | | | agtcttccaggccaaaaagaggcttcttgaacctcttggtctggttgagg |
| | | | aagcggctaagacggctcctggaaagaagaggcctgtagagcagtctcct |
| | | | caggaaccggactcctccgcgggtattggcaaatcgggtgcacagcccgc |
| | | | taaaaagagactcaatttcggtcagactggcgacacagagtcagtcccag |
| | | | accctcaaccaatcggagaacctcccgcagccccctcaggtgtgggatct |
| | | | cttacaatggcttcaggtggtggcgcaccagtggcagacaataacgaagg |
| | | | tgccgatggagtgggtagttcctcgggaaattggcattgcgattcccaat |
| | | | ggctgggggacagagtcatcaccaccagcacccgaacctgggccctgccc |
| | | | acctacaacaatcacctctacaagcaaatctccaacagcacatctggagg |
| | | | atcttcaaatgacaacgcctacttcggctacagcaccccctgggggtatt |
| | | | ttgacttcaacagattccactgccacttctcaccacgtgactggcagcga |
| | | | ctcatcaacaacaactggggattccggcctaagcgactcaacttcaagct |
| | | | cttcaacattcaggtcaaagaggttacggacaacaatggagtcaagacca |
| | | | tcgccaataaccttaccagcacggtccaggtcttcacggactcagactat |
| | | | cagctcccgtacgtgctcgggtcggctcacgagggctgcctcccgccgtt |
| | | | cccagcggacgttttcatgattcctcagtacgggtatctgacgcttaatg |
| | | | atggaagccaggccgtgggtcgttcgtccttttactgcctggaatatttc |
| | | | ccgtcgcaaatgctaagaacgggtaacaacttccagttcagctacgagtt |
| | | | tgagaacgtacctttccatagcagctacgctcacagccaaagcctggacc |
| | | | gactaatgaatccactcatcgaccaatacttgtactatctctcTaGAact |
| | | | attAACGGTTCTGGACAGAATCAAcaaacgctaaaattcagtgtggccgg |
| | | | acccagcaacatggctgtccagggaagaaactacatacctggacccagct |
| | | | accgacaacaacgtgtctcaaccactgtgactcaaaacaacaacagcgaa |
| | | | tttgcttggcctggagcttcttcttgggctctcaatggacgtaatagctt |
| | | | gatgaatcctggacctgctatggccagccacaaagaaggagaggaccgtt |
| | | | tctttcctttgtctggatctttaatttttggcaaacaaggTacCggCaga |
| | | | gacaacgtggatgcggacaaagtcatgataaccaacgaagaagaaattaa |
| | | | aactactaacccggtagcaacggagtcctatggacaagtggccacaaacc |
| | | | accagagtGCGCAAGGGAATGACACCAGATCGACTGCGCAGGCTCAGacc |
| | | | ggttgggttcaaaaccaaggaatacttccgggtatggtttggcaggacag |
| | | | agatgtgtacctgcaaggacccatttgggccaaaattcctcacacggacg |
| | | | gcaactttcacccttctccgctgatgggagggtttggaatgaagcacccg |
| | | | cctcctcagatcctcatcaaaaacacacctgtacctgcggatcctccaac |
| | | | ggccttcaacaaggacaagctgaactctttcatcacccagtattctactg |
| | | | gccaagtcagcgtggagatcgagtgggagctgcagaaggaaaacagcaag |
| | | | cgctggaacccggagatccagtacacttccaactattacaagtctaataa |
| | | | tgttgaatttgctgttaatactgaaggtgtatatagtgaaccccgcccca |
| | | | ttggcaccagatacctgactcgtaatctg |
| 200 | DNA | Adeno- | atggctgccgatggttatcttccagattggctcgaggacaaccttagtga |
| | | Associated | aggaattcgcgagtggtgggctttgaaacctggagcccctcaacccaagg |
| | | Virus 9 | caaatcaacaacatcaagacaacgctcgaggtcttgtgcttccgggttac |
| | | comprising | aaataccttggacccggcaacggactcgacaagggggagccggtcaacgc |
| | | SEQ | agcagacgcggcggccctcgagcacgacaaggcctacgaccagcagctca |
| | | ID NO: 18 | aggccggagacaacccgtacctcaagtacaaccacgccgacgccgagttc |
| | | | caggagcggctcaaagaagatacgtcttttgggggcaacctcgggcgagc |
| | | | agtcttccaggccaaaaagaggcttcttgaacctcttggtctggttgagg |
| | | | aagcggctaagacggctcctggaaagaagaggcctgtagagcagtctcct |
| | | | caggaaccggactcctccgcgggtattggcaaatcgggtgcacagcccgc |
| | | | taaaaagagactcaatttcggtcagactggcgacacagagtcagtcccag |
| | | | accctcaaccaatcggagaacctcccgcagccccctcaggtgtgggatct |
| | | | cttacaatggcttcaggtggtggcgcaccagtggcagacaataacgaagg |
| | | | tgccgatggagtgggtagttcctcgggaaattggcattgcgattcccaat |
| | | | ggctgggggacagagtcatcaccaccagcacccgaacctgggccctgccc |
| | | | acctacaacaatcacctctacaagcaaatctccaacagcacatctggagg |
| | | | atcttcaaatgacaacgcctacttcggctacagcaccccctgggggtatt |
| | | | ttgacttcaacagattccactgccacttctcaccacgtgactggcagcga |
| | | | ctcatcaacaacaactggggattccggcctaagcgactcaacttcaagct |
| | | | cttcaacattcaggtcaaagaggttacggacaacaatggagtcaagacca |
| | | | tcgccaataaccttaccagcacggtccaggtcttcacggactcagactat |
| | | | agctcccgtacgtgctcgggtcggctcacgagggctgcctcccgccgttc |
| | | | ccagcggacgttttcatgattcctcagtacgggtatctgacgcttaatga |
| | | | tggaagccaggccgtgggtcgttcgtccttttactgcctggaatatttcc |
| | | | cgtcgcaaatgctaagaacgggtaacaacttccagttcagctacgagttt |
| | | | gagaacgtacctttccatagcagctacgctcacagccaaagcctggaccg |
| | | | actaatgaatccactcatcgaccaatacttgtactatctctcTaGAacta |
| | | | ttAACGGTTCTGGACAGAATCAAcaaacgctaaaattcagtgtggccgga |
| | | | cccagcaacatggctgtccagggaagaaactacatacctggacccagcta |
| | | | ccgacaacaacgtgtctcaaccactgtgactcaaaacaacaacagcgaat |
| | | | ttgcttggcctggagcttcttcttgggctctcaatggacgtaatagcttg |
| | | | atgaatcctggacctgctatggccagccacaaagaaggagaggaccgttt |
| | | | ctttcctttgtctggatctttaatttttggcaaacaaggTacCggCagag |
| | | | acaacgtggatgcggacaaagtcatgataaccaacgaagaagaaattaaa |
| | | | actactaacccggtagcaacggagtcctatggacaagtggccacaaacca |
| | | | ccagagtGCTCAAGGTAATGACACACGCTCTACAGCCCAGGCTCAAaccg |
| | | | gttgggttcaaaaccaaggaatacttccgggtatggtttggcaggacaga |
| | | | gatgtgtacctgcaaggacccatttgggccaaaattcctcacacggacgg |
| | | | caactttcacccttctccgctgatgggagggtttggaatgaagcacccgc |
| | | | ctcctcagatcctcatcaaaaacacacctgtacctgcggatcctccaacg |
| | | | gccttcaacaaggacaagctgaactctttcatcacccagtattctactgg |
| | | | ccaagtcagcgtggagatcgagtgggagctgcagaaggaaaacagcaagc |
| | | | gctggaacccggagatccagtacacttccaactattacaagtctaataat |
| | | | gttgaatttgctgttaatactgaaggtgtatatagtgaaccccgccccat |
| | | | tggcaccagatacctgactcgtaatctg |
| 201 | DNA | Adeno- | atggctgccgatggttatcttccagattggctcgaggacaaccttagtga |
| | | Associated | aggaattcgcgagtggtgggctttgaaacctggagcccctcaacccaagg |
| | | Virus 9 | caaatcaacaacatcaagacaacgctcgaggtcttgtgcttccgggttac |
| | | comprising | aaataccttggacccggcaacggactcgacaagggggagccggtcaacgc |
| | | SEQ | agcagacgcggcggccctcgagcacgacaaggcctacgaccagcagctca |
| | | ID NO: 19 | aggccggagacaacccgtacctcaagtacaaccacgccgacgccgagttc |
| | | | caggagcggctcaaagaagatacgtcttttgggggcaacctcgggcgagc |
| | | | agtcttccaggccaaaaagaggcttcttgaacctcttggtctggttgagg |
| | | | aagcggctaagacggctcctggaaagaagaggcctgtagagcagtctcct |
| | | | caggaaccggactcctccgcgggtattggcaaatcgggtgcacagcccgc |
| | | | taaaaagagactcaatttcggtcagactggcgacacagagtcagtcccag |
| | | | accctcaaccaatcggagaacctcccgcagccccctcaggtgtgggatct |
| | | | cttacaatggcttcaggtggtggcgcaccagtggcagacaataacgaagg |
| | | | tgccgatggagtgggtagttcctcgggaaattggcattgcgattcccaat |
| | | | ggctgggggacagagtcatcaccaccagcacccgaacctgggccctgccc |
| | | | acctacaacaatcacctctacaagcaaatctccaacagcacatctggagg |
| | | | atcttcaaatgacaacgcctacttcggctacagcaccccctgggggtatt |
| | | | ttgacttcaacagattccactgccacttctcaccacgtgactggcagcga |
| | | | ctcatcaacaacaactggggattccggcctaagcgactcaacttcaagct |
| | | | cttcaacattcaggtcaaagaggttacggacaacaatggagtcaagacca |
| | | | tcgccaataaccttaccagcacggtccaggtcttcacggactcagactat |
| | | | cagctcccgtacgtgctcgggtcggctcacgagggctgcctcccgccgtt |
| | | | cccagcggacgttttcatgattcctcagtacgggtatctgacgcttaatg |
| | | | atggaagccaggccgtgggtcgttcgtccttttactgcctggaatatttc |
| | | | ccgtcgcaaatgctaagaacgggtaacaacttccagttcagctacgagtt |
| | | | tgagaacgtacctttccatagcagctacgctcacagccaaagcctggacc |
| | | | gactaatgaatccactcatcgaccaatacttgtactatctctcTaGAact |
| | | | attAACGGTTCTGGACAGAATCAAcaaacgctaaaattcagtgtggccgg |
| | | | acccagcaacatggctgtccagggaagaaactacatacctggacccagct |
| | | | accgacaacaacgtgtctcaaccactgtgactcaaaacaacaacagcgaa |
| | | | tttgcttggcctggagcttcttcttgggctctcaatggacgtaatagctt |
| | | | gatgaatcctggacctgctatggccagccacaaagaaggagaggaccgtt |
| | | | tctttcctttgtctggatctttaatttttggcaaacaaggTacCggCaga |
| | | | gacaacgtggatgcggacaaagtcatgataaccaacgaagaagaaattaa |
| | | | aactactaacccggtagcaacggagtcctatggacaagtggccacaaacc |
| | | | accagagtGCCCAGATGAACAGCACAATATCTAAAGCGCAGGCACAGacc |
| | | | ggttgggttcaaaaccaaggaatacttccgggtatggtttggcaggacag |
| | | | agatgtgtacctgcaaggacccatttgggccaaaattcctcacacggacg |
| | | | gcaactttcacccttctccgctgatgggagggtttggaatgaagcacccg |
| | | | cctcctcagatcctcatcaaaaacacacctgtacctgcggatcctccaac |
| | | | ggccttcaacaaggacaagctgaactctttcatcacccagtattctactg |
| | | | gccaagtcagcgtggagatcgagtgggagctgcagaaggaaaacagcaag |
| | | | cgctggaacccggagatccagtacacttccaactattacaagtctaataa |
| | | | tgttgaatttgctgttaatactgaaggtgtatatagtgaaccccgcccca |
| | | | ttggcaccagatacctgactcgtaatctg |
| 202 | DNA | Adeno- | atggctgccgatggttatcttccagattggctcgaggacaaccttagtga |
| | | Associated | aggaattcgcgagtggtgggctttgaaacctggagcccctcaacccaagg |
| | | Virus 9 | caaatcaacaacatcaagacaacgctcgaggtcttgtgcttccgggttac |
| | | comprising | aaataccttggacccggcaacggactcgacaagggggagccggtcaacgc |
| | | SEQ | agcagacgcggcggccctcgagcacgacaaggcctacgaccagcagctca |
| | | ID NO: 19 | aggccggagacaacccgtacctcaagtacaaccacgccgacgccgagttc |
| | | | caggagcggctcaaagaagatacgtcttttgggggcaacctcgggcgagc |
| | | | agtcttccaggccaaaaagaggcttcttgaacctcttggtctggttgagg |
| | | | aagcggctaagacggctcctggaaagaagaggcctgtagagcagtctcct |
| | | | caggaaccggactcctccgcgggtattggcaaatcgggtgcacagcccgc |
| | | | taaaaagagactcaatttcggtcagactggcgacacagagtcagtcccag |
| | | | accctcaaccaatcggagaacctcccgcagccccctcaggtgtgggatct |
| | | | cttacaatggcttcaggtggtggcgcaccagtggcagacaataacgaagg |
| | | | tgccgatggagtgggtagttcctcgggaaattggcattgcgattcccaat |
| | | | ggctgggggacagagtcatcaccaccagcacccgaacctgggccctgccc |
| | | | acctacaacaatcacctctacaagcaaatctccaacagcacatctggagg |
| | | | atcttcaaatgacaacgcctacttcggctacagcaccccctgggggtatt |
| | | | ttgacttcaacagattccactgccacttctcaccacgtgactggcagcga |
| | | | ctcatcaacaacaactggggattccggcctaagcgactcaacttcaagct |
| | | | cttcaacattcaggtcaaagaggttacggacaacaatggagtcaagacca |
| | | | tcgccaataaccttaccagcacggtccaggtcttcacggactcagactat |
| | | | cagctcccgtacgtgctcgggtcggctcacgagggctgcctcccgccgtt |
| | | | cccagcggacgttttcatgattcctcagtacgggtatctgacgcttaatg |
| | | | atggaagccaggccgtgggtcgttcgtccttttactgcctggaatatttc |
| | | | ccgtcgcaaatgctaagaacgggtaacaacttccagttcagctacgagtt |
| | | | tgagaacgtacctttccatagcagctacgctcacagccaaagcctggacc |
| | | | gactaatgaatccactcatcgaccaatacttgtactatctctcTaGAact |
| | | | attAACGGTTCTGGACAGAATCAAcaaacgctaaaattcagtgtggccgg |
| | | | acccagcaacatggctgtccagggaagaaactacatacctggacccagct |
| | | | accgacaacaacgtgtctcaaccactgtgactcaaaacaacaacagcgaa |
| | | | tttgcttggcctggagcttcttcttgggctctcaatggacgtaatagctt |
| | | | gatgaatcctggacctgctatggccagccacaaagaaggagaggaccgtt |
| | | | tctttcctttgtctggatctttaatttttggcaaacaaggTacCggCaga |
| | | | gacaacgtggatgcggacaaagtcatgataaccaacgaagaagaaattaa |
| | | | aactactaacccggtagcaacggagtcctatggacaagtggccacaaacc |
| | | | accagagtGCACAGATGAATAGCACCATATCGAAAGCACAAGCTCAAacc |
| | | | ggttgggttcaaaaccaaggaatacttccgggtatggtttggcaggacag |
| | | | agatgtgtacctgcaaggacccatttgggccaaaattcctcacacggacg |
| | | | gcaactttcacccttctccgctgatgggagggtttggaatgaagcacccg |
| | | | cctcctcagatcctcatcaaaaacacacctgtacctgcggatcctccaac |
| | | | ggccttcaacaaggacaagctgaactctttcatcacccagtattctactg |
| | | | gccaagtcagcgtggagatcgagtgggagctgcagaaggaaaacagcaag |
| | | | cgctggaacccggagatccagtacacttccaactattacaagtctaataa |
| | | | tgttgaatttgctgttaatactgaaggtgtatatagtgaaccccgcccca |
| | | | ttggcaccagatacctgactcgtaatctg |
| 203 | DNA | Adeno- | atggctgccgatggttatcttccagattggctcgaggacaaccttagtga |
| | | Associated | aggaattcgcgagtggtgggctttgaaacctggagcccctcaacccaagg |
| | | Virus 9 | caaatcaacaacatcaagacaacgctcgaggtcttgtgcttccgggttac |
| | | comprising | aaataccttggacccggcaacggactcgacaagggggagccggtcaacgc |
| | | SEQ | agcagacgcggcggccctcgagcacgacaaggcctacgaccagcagctca |
| | | ID NO: 19 | aggccggagacaacccgtacctcaagtacaaccacgccgacgccgagttc |
| | | | caggagcggctcaaagaagatacgtcttttgggggcaacctcgggcgagc |
| | | | agtcttccaggccaaaaagaggcttcttgaacctcttggtctggttgagg |
| | | | aagcggctaagacggctcctggaaagaagaggcctgtagagcagtctcct |
| | | | caggaaccggactcctccgcgggtattggcaaatcgggtgcacagcccgc |
| | | | taaaaagagactcaatttcggtcagactggcgacacagagtcagtcccag |
| | | | accctcaaccaatcggagaacctcccgcagccccctcaggtgtgggatct |
| | | | cttacaatggcttcaggtggtggcgcaccagtggcagacaataacgaagg |
| | | | tgccgatggagtgggtagttcctcgggaaattggcattgcgattcccaat |
| | | | ggctgggggacagagtcatcaccaccagcacccgaacctgggccctgccc |
| | | | acctacaacaatcacctctacaagcaaatctccaacagcacatctggagg |
| | | | atcttcaaatgacaacgcctacttcggctacagcaccccctgggggtatt |
| | | | ttgacttcaacagattccactgccacttctcaccacgtgactggcagcga |
| | | | ctcatcaacaacaactggggattccggcctaagcgactcaacttcaagct |
| | | | cttcaacattcaggtcaaagaggttacggacaacaatggagtcaagacca |
| | | | tcgccaataaccttaccagcacggtccaggtcttcacggactcagactat |
| | | | cagctcccgtacgtgctcgggtcggctcacgagggctgcctcccgccgtt |
| | | | cccagcggacgttttcatgattcctcagtacgggtatctgacgcttaatg |
| | | | atggaagccaggccgtgggtcgttcgtccttttactgcctggaatatttc |
| | | | ccgtcgcaaatgctaagaacgggtaacaacttccagttcagctacgagtt |
| | | | tgagaacgtacctttccatagcagctacgctcacagccaaagcctggacc |
| | | | gactaatgaatccactcatcgaccaatacttgtactatctctcTaGAact |
| | | | attAACGGTTCTGGACAGAATCAAcaaacgctaaaattcagtgtggccgg |
| | | | acccagcaacatggctgtccagggaagaaactacatacctggacccagct |
| | | | accgacaacaacgtgtctcaaccactgtgactcaaaacaacaacagcgaa |
| | | | tttgcttggcctggagcttcttcttgggctctcaatggacgtaatagctt |
| | | | gatgaatcctggacctgctatggccagccacaaagaaggagaggaccgtt |
| | | | tctttcctttgtctggatctttaatttttggcaaacaaggTacCggCaga |
| | | | gacaacgtggatgcggacaaagtcatgataaccaacgaagaagaaattaa |
| | | | aactactaacccggtagcaacggagtcctatggacaagtggccacaaacc |
| | | | accagagtGCTCAAATGAACTCAACAATTTCAAAGGCGCAAGCACAGacc |
| | | | ggttgggttcaaaaccaaggaatacttccgggtatggtttggcaggacag |
| | | | agatgtgtacctgcaaggacccatttgggccaaaattcctcacacggacg |
| | | | gcaactttcacccttctccgctgatgggagggtttggaatgaagcacccg |
| | | | cctcctcagatcctcatcaaaaacacacctgtacctgcggatcctccaac |
| | | | ggccttcaacaaggacaagctgaactctttcatcacccagtattctactg |
| | | | gccaagtcagcgtggagatcgagtgggagctgcagaaggaaaacagcaag |
| | | | cgctggaacccggagatccagtacacttccaactattacaagtctaataa |
| | | | tgttgaatttgctgttaatactgaaggtgtatatagtgaaccccgcccca |
| | | | ttggcaccagatacctgactcgtaatctg |
| 204 | DNA | Adeno- | atggctgccgatggttatcttccagattggctcgaggacaaccttagtga |
| | | Associated | aggaattcgcgagtggtgggctttgaaacctggagcccctcaacccaagg |
| | | Virus 9 | caaatcaacaacatcaagacaacgctcgaggtcttgtgcttccgggttac |
| | | comprising | aaataccttggacccggcaacggactcgacaagggggagccggtcaacgc |
| | | SEQ | agcagacgcggcggccctcgagcacgacaaggcctacgaccagcagctca |
| | | ID NO: 19 | aggccggagacaacccgtacctcaagtacaaccacgccgacgccgagttc |
| | | | caggagcggctcaaagaagatacgtcttttgggggcaacctcgggcgagc |
| | | | agtcttccaggccaaaaagaggcttcttgaacctcttggtctggttgagg |
| | | | aagcggctaagacggctcctggaaagaagaggcctgtagagcagtctcct |
| | | | caggaaccggactcctccgcgggtattggcaaatcgggtgcacagcccgc |
| | | | taaaaagagactcaatttcggtcagactggcgacacagagtcagtcccag |
| | | | accctcaaccaatcggagaacctcccgcagccccctcaggtgtgggatct |
| | | | cttacaatggcttcaggtggtggcgcaccagtggcagacaataacgaagg |
| | | | tgccgatggagtgggtagttcctcgggaaattggcattgcgattcccaat |
| | | | ggctgggggacagagtcatcaccaccagcacccgaacctgggccctgccc |
| | | | acctacaacaatcacctctacaagcaaatctccaacagcacatctggagg |
| | | | atcttcaaatgacaacgcctacttcggctacagcaccccctgggggtatt |
| | | | ttgacttcaacagattccactgccacttctcaccacgtgactggcagcga |
| | | | ctcatcaacaacaactggggattccggcctaagcgactcaacttcaagct |
| | | | cttcaacattcaggtcaaagaggttacggacaacaatggagtcaagacca |
| | | | tcgccaataaccttaccagcacggtccaggtcttcacggactcagactat |
| | | | cagctcccgtacgtgctcgggtcggctcacgagggctgcctcccgccgtt |
| | | | cccagcggacgttttcatgattcctcagtacgggtatctgacgcttaatg |
| | | | atggaagccaggccgtgggtcgttcgtccttttactgcctggaatatttc |
| | | | ccgtcgcaaatgctaagaacgggtaacaacttccagttcagctacgagtt |
| | | | tgagaacgtacctttccatagcagctacgctcacagccaaagcctggacc |
| | | | gactaatgaatccactcatcgaccaatacttgtactatctctcTaGAact |
| | | | attAACGGTTCTGGACAGAATCAAcaaacgctaaaattcagtgtggccgg |
| | | | acccagcaacatggctgtccagggaagaaactacatacctggacccagct |
| | | | accgacaacaacgtgtctcaaccactgtgactcaaaacaacaacagcgaa |
| | | | tttgcttggcctggagcttcttcttgggctctcaatggacgtaatagctt |
| | | | gatgaatcctggacctgctatggccagccacaaagaaggagaggaccgtt |
| | | | tctttcctttgtctggatctttaatttttggcaaacaaggTacCggCaga |
| | | | gacaacgtggatgcggacaaagtcatgataaccaacgaagaagaaattaa |
| | | | aactactaacccggtagcaacggagtcctatggacaagtggccacaaacc |
| | | | accagagtGCACAGATGAATAGTACCATATCGAAAGCCCAGGCTCAAacc |
| | | | ggttgggttcaaaaccaaggaatacttccgggtatggtttggcaggacag |
| | | | agatgtgtacctgcaaggacccatttgggccaaaattcctcacacggacg |
| | | | gcaactttcacccttctccgctgatgggagggtttggaatgaagcacccg |
| | | | cctcctcagatcctcatcaaaaacacacctgtacctgcggatcctccaac |
| | | | ggccttcaacaaggacaagctgaactctttcatcacccagtattctactg |
| | | | gccaagtcagcgtggagatcgagtgggagctgcagaaggaaaacagcaag |
| | | | cgctggaacccggagatccagtacacttccaactattacaagtctaataa |
| | | | tgttgaatttgctgttaatactgaaggtgtatatagtgaaccccgcccca |
| | | | ttggcaccagatacctgactcgtaatctg |
| 205 | DNA | Adeno- | atggctgccgatggttatcttccagattggctcgaggacaaccttagtga |
| | | Associated | aggaattcgcgagtggtgggctttgaaacctggagcccctcaacccaagg |
| | | Virus 9 | caaatcaacaacatcaagacaacgctcgaggtcttgtgcttccgggttac |
| | | comprising | aaataccttggacccggcaacggactcgacaagggggagccggtcaacgc |
| | | SEQ | agcagacgcggcggccctcgagcacgacaaggcctacgaccagcagctca |
| | | ID NO: 19 | aggccggagacaacccgtacctcaagtacaaccacgccgacgccgagttc |
| | | | caggagcggctcaaagaagatacgtcttttgggggcaacctcgggcgagc |
| | | | agtcttccaggccaaaaagaggcttcttgaacctcttggtctggttgagg |
| | | | aagcggctaagacggctcctggaaagaagaggcctgtagagcagtctcct |
| | | | caggaaccggactcctccgcgggtattggcaaatcgggtgcacagcccgc |
| | | | taaaaagagactcaatttcggtcagactggcgacacagagtcagtcccag |
| | | | accctcaaccaatcggagaacctcccgcagccccctcaggtgtgggatct |
| | | | cttacaatggcttcaggtggtggcgcaccagtggcagacaataacgaagg |
| | | | tgccgatggagtgggtagttcctcgggaaattggcattgcgattcccaat |
| | | | ggctgggggacagagtcatcaccaccagcacccgaacctgggccctgccc |
| | | | acctacaacaatcacctctacaagcaaatctccaacagcacatctggagg |
| | | | atcttcaaatgacaacgcctacttcggctacagcaccccctgggggtatt |
| | | | ttgacttcaacagattccactgccacttctcaccacgtgactggcagcga |
| | | | ctcatcaacaacaactggggattccggcctaagcgactcaacttcaagct |
| | | | cttcaacattcaggtcaaagaggttacggacaacaatggagtcaagacca |
| | | | tcgccaataaccttaccagcacggtccaggtcttcacggactcagactat |
| | | | cagctcccgtacgtgctcgggtcggctcacgagggctgcctcccgccgtt |
| | | | cccagcggacgttttcatgattcctcagtacgggtatctgacgcttaatg |
| | | | atggaagccaggccgtgggtcgttcgtccttttactgcctggaatatttc |
| | | | ccgtcgcaaatgctaagaacgggtaacaacttccagttcagctacgagtt |
| | | | tgagaacgtacctttccatagcagctacgctcacagccaaagcctggacc |
| | | | gactaatgaatccactcatcgaccaatacttgtactatctctcTaGAact |
| | | | attAACGGTTCTGGACAGAATCAAcaaacgctaaaattcagtgtggccgg |
| | | | acccagcaacatggctgtccagggaagaaactacatacctggacccagct |
| | | | accgacaacaacgtgtctcaaccactgtgactcaaaacaacaacagcgaa |
| | | | tttgcttggcctggagcttcttcttgggctctcaatggacgtaatagctt |
| | | | gatgaatcctggacctgctatggccagccacaaagaaggagaggaccgtt |
| | | | tctttcctttgtctggatctttaatttttggcaaacaaggTacCggCaga |
| | | | gacaacgtggatgcggacaaagtcatgataaccaacgaagaagaaattaa |
| | | | aactactaacccggtagcaacggagtcctatggacaagtggccacaaacc |
| | | | accagagtGCGCAAATGAATAGTACGATCAGTAAGGCTCAAGCGCAAacc |
| | | | ggttgggttcaaaaccaaggaatacttccgggtatggtttggcaggacag |
| | | | agatgtgtacctgcaaggacccatttgggccaaaattcctcacacggacg |
| | | | gcaactttcacccttctccgctgatgggagggtttggaatgaagcacccg |
| | | | cctcctcagatcctcatcaaaaacacacctgtacctgcggatcctccaac |
| | | | ggccttcaacaaggacaagctgaactctttcatcacccagtattctactg |
| | | | gccaagtcagcgtggagatcgagtgggagctgcagaaggaaaacagcaag |
| | | | cgctggaacccggagatccagtacacttccaactattacaagtctaataa |
| | | | tgttgaatttgctgttaatactgaaggtgtatatagtgaaccccgcccca |
| | | | ttggcaccagatacctgactcgtaatctg |
| 206 | DNA | Adeno- | atggctgccgatggttatcttccagattggctcgaggacaaccttagtga |
| | | Associated | aggaattcgcgagtggtgggctttgaaacctggagcccctcaacccaagg |
| | | Virus 9 | caaatcaacaacatcaagacaacgctcgaggtcttgtgcttccgggttac |
| | | comprising | aaataccttggacccggcaacggactcgacaagggggagccggtcaacgc |
| | | SEQ | agcagacgcggcggccctcgagcacgacaaggcctacgaccagcagctca |
| | | ID NO: 19 | aggccggagacaacccgtacctcaagtacaaccacgccgacgccgagttc |
| | | | caggagcggctcaaagaagatacgtcttttgggggcaacctcgggcgagc |
| | | | agtcttccaggccaaaaagaggcttcttgaacctcttggtctggttgagg |
| | | | aagcggctaagacggctcctggaaagaagaggcctgtagagcagtctcct |
| | | | caggaaccggactcctccgcgggtattggcaaatcgggtgcacagcccgc |
| | | | taaaaagagactcaatttcggtcagactggcgacacagagtcagtcccag |
| | | | accctcaaccaatcggagaacctcccgcagccccctcaggtgtgggatct |
| | | | cttacaatggcttcaggtggtggcgcaccagtggcagacaataacgaagg |
| | | | tgccgatggagtgggtagttcctcgggaaattggcattgcgattcccaat |
| | | | ggctgggggacagagtcatcaccaccagcacccgaacctgggccctgccc |
| | | | acctacaacaatcacctctacaagcaaatctccaacagcacatctggagg |
| | | | atcttcaaatgacaacgcctacttcggctacagcaccccctgggggtatt |
| | | | ttgacttcaacagattccactgccacttctcaccacgtgactggcagcga |
| | | | ctcatcaacaacaactggggattccggcctaagcgactcaacttcaagct |
| | | | cttcaacattcaggtcaaagaggttacggacaacaatggagtcaagacca |
| | | | tcgccaataaccttaccagcacggtccaggtcttcacggactcagactat |
| | | | cagctcccgtacgtgctcgggtcggctcacgagggctgcctcccgccgtt |
| | | | cccagcggacgttttcatgattcctcagtacgggtatctgacgcttaatg |
| | | | atggaagccaggccgtgggtcgttcgtccttttactgcctggaatatttc |
| | | | ccgtcgcaaatgctaagaacgggtaacaacttccagttcagctacgagtt |
| | | | tgagaacgtacctttccatagcagctacgctcacagccaaagcctggacc |
| | | | gactaatgaatccactcatcgaccaatacttgtactatctctcTaGAact |
| | | | attAACGGTTCTGGACAGAATCAAcaaacgctaaaattcagtgtggccgg |
| | | | acccagcaacatggctgtccagggaagaaactacatacctggacccagct |
| | | | accgacaacaacgtgtctcaaccactgtgactcaaaacaacaacagcgaa |
| | | | tttgcttggcctggagcttcttcttgggctctcaatggacgtaatagctt |
| | | | gatgaatcctggacctgctatggccagccacaaagaaggagaggaccgtt |
| | | | tctttcctttgtctggatctttaatttttggcaaacaaggTacCggCaga |
| | | | gacaacgtggatgcggacaaagtcatgataaccaacgaagaagaaattaa |
| | | | aactactaacccggtagcaacggagtcctatggacaagtggccacaaacc |
| | | | accagagtGCTCAGATGAATTCTACGATATCGAAGGCACAGGCACAGacc |
| | | | ggttgggttcaaaaccaaggaatacttccgggtatggtttggcaggacag |
| | | | agatgtgtacctgcaaggacccatttgggccaaaattcctcacacggacg |
| | | | gcaactttcacccttctccgctgatgggagggtttggaatgaagcacccg |
| | | | cctcctcagatcctcatcaaaaacacacctgtacctgcggatcctccaac |
| | | | ggccttcaacaaggacaagctgaactctttcatcacccagtattctactg |
| | | | gccaagtcagcgtggagatcgagtgggagctgcagaaggaaaacagcaag |
| | | | cgctggaacccggagatccagtacacttccaactattacaagtctaataa |
| | | | tgttgaatttgctgttaatactgaaggtgtatatagtgaaccccgcccca |
| | | | ttggcaccagatacctgactcgtaatctg |
| 207 | DNA | Adeno- | atggctgccgatggttatcttccagattggctcgaggacaaccttagtga |
| | | Associated | aggaattcgcgagtggtgggctttgaaacctggagcccctcaacccaagg |
| | | Virus 9 | caaatcaacaacatcaagacaacgctcgaggtcttgtgcttccgggttac |
| | | comprising | aaataccttggacccggcaacggactcgacaagggggagccggtcaacgc |
| | | SEQ | agcagacgcggcggccctcgagcacgacaaggcctacgaccagcagctca |
| | | ID NO: 19 | aggccggagacaacccgtacctcaagtacaaccacgccgacgccgagttc |
| | | | caggagcggctcaaagaagatacgtcttttgggggcaacctcgggcgagc |
| | | | agtcttccaggccaaaaagaggcttcttgaacctcttggtctggttgagg |
| | | | aagcggctaagacggctcctggaaagaagaggcctgtagagcagtctcct |
| | | | caggaaccggactcctccgcgggtattggcaaatcgggtgcacagcccgc |
| | | | taaaaagagactcaatttcggtcagactggcgacacagagtcagtcccag |
| | | | accctcaaccaatcggagaacctcccgcagccccctcaggtgtgggatct |
| | | | cttacaatggcttcaggtggtggcgcaccagtggcagacaataacgaagg |
| | | | tgccgatggagtgggtagttcctcgggaaattggcattgcgattcccaat |
| | | | ggctgggggacagagtcatcaccaccagcacccgaacctgggccctgccc |
| | | | acctacaacaatcacctctacaagcaaatctccaacagcacatctggagg |
| | | | atcttcaaatgacaacgcctacttcggctacagcaccccctgggggtatt |
| | | | ttgacttcaacagattccactgccacttctcaccacgtgactggcagcga |
| | | | ctcatcaacaacaactggggattccggcctaagcgactcaacttcaagct |
| | | | cttcaacattcaggtcaaagaggttacggacaacaatggagtcaagacca |
| | | | tcgccaataaccttaccagcacggtccaggtcttcacggactcagactat |
| | | | cagctcccgtacgtgctcgggtcggctcacgagggctgcctcccgccgtt |
| | | | cccagcggacgttttcatgattcctcagtacgggtatctgacgcttaatg |
| | | | atggaagccaggccgtgggtcgttcgtccttttactgcctggaatatttc |
| | | | ccgtcgcaaatgctaagaacgggtaacaacttccagttcagctacgagtt |
| | | | tgagaacgtacctttccatagcagctacgctcacagccaaagcctggacc |
| | | | gactaatgaatccactcatcgaccaatacttgtactatctctcTaGAact |
| | | | attAACGGTTCTGGACAGAATCAAcaaacgctaaaattcagtgtggccgg |
| | | | acccagcaacatggctgtccagggaagaaactacatacctggacccagct |
| | | | accgacaacaacgtgtctcaaccactgtgactcaaaacaacaacagcgaa |
| | | | tttgcttggcctggagcttcttcttgggctctcaatggacgtaatagctt |
| | | | gatgaatcctggacctgctatggccagccacaaagaaggagaggaccgtt |
| | | | tctttcctttgtctggatctttaatttttggcaaacaaggTacCggCaga |
| | | | gacaacgtggatgcggacaaagtcatgataaccaacgaagaagaaattaa |
| | | | aactactaacccggtagcaacggagtcctatggacaagtggccacaaacc |
| | | | accagagtGCTCAAATGAACTCGACGATCTCGAAGGCGCAAGCCCAGacc |
| | | | ggttgggttcaaaaccaaggaatacttccgggtatggtttggcaggacag |
| | | | agatgtgtacctgcaaggacccatttgggccaaaattcctcacacggacg |
| | | | gcaactttcacccttctccgctgatgggagggtttggaatgaagcacccg |
| | | | cctcctcagatcctcatcaaaaacacacctgtacctgcggatcctccaac |
| | | | ggccttcaacaaggacaagctgaactctttcatcacccagtattctactg |
| | | | gccaagtcagcgtggagatcgagtgggagctgcagaaggaaaacagcaag |
| | | | cgctggaacccggagatccagtacacttccaactattacaagtctaataa |
| | | | tgttgaatttgctgttaatactgaaggtgtatatagtgaaccccgcccca |
| | | | ttggcaccagatacctgactcgtaatctg |
| 208 | DNA | Adeno- | atggctgccgatggttatcttccagattggctcgaggacaaccttagtga |
| | | Associated | aggaattcgcgagtggtgggctttgaaacctggagcccctcaacccaagg |
| | | Virus 9 | caaatcaacaacatcaagacaacgctcgaggtcttgtgcttccgggttac |
| | | comprising | aaataccttggacccggcaacggactcgacaagggggagccggtcaacgc |
| | | SEQ | agcagacgcggcggccctcgagcacgacaaggcctacgaccagcagctca |
| | | ID NO: 19 | aggrcggagacaacccgtacctcaagtacaaccacgccgacgccgagttc |
| | | | caggagcggctcaaagaagatacgtcttttgggggcaacctcgggcgagc |
| | | | agtcttccaggccaaaaagaggcttcttgaacctcttggtctggttgagg |
| | | | aagcggctaagacggctcctggaaagaagaggcctgtagagcagtctcct |
| | | | caggaaccggactcctccgcgggtattggcaaatcgggtgcacagcccgc |
| | | | taaaaagagactcaatttcggtcagactggcgacacagagtcagtcccag |
| | | | accctcaaccaatcggagaacctcccgcagccccctcaggtgtgggatct |
| | | | cttacaatggcttcaggtggtggcgcaccagtggcagacaataacgaagg |
| | | | tgccgatggagtgggtagttcctcgggaaattggcattgcgattcccaat |
| | | | ggctgggggacagagtcatcaccaccagcacccgaacctgggccctgccc |
| | | | acctacaacaatcacctctacaagcaaatctccaacagcacatctggagg |
| | | | atcttcaaatgacaacgcctacttcggctacagcaccccctgggggtatt |
| | | | ttgacttcaacagattccactgccacttctcaccacgtgactggcagcga |
| | | | ctcatcaacaacaactggggattccggcctaagcgactcaacttcaagct |
| | | | cttcaacattcaggtcaaagaggttacggacaacaatggagtcaagacca |
| | | | tcgccaataaccttaccagcacggtccaggtcttcacggactcagactat |
| | | | cagctcccgtacgtgctcgggtcggctcacgagggctgcctcccgccgtt |
| | | | cccagcggacgttttcatgattcctcagtacgggtatctgacgcttaatg |
| | | | atggaagccaggccgtgggtcgttcgtccttttactgcctggaatatttc |
| | | | ccgtcgcaaatgctaagaacgggtaacaacttccagttcagctacgagtt |
| | | | tgagaacgtacctttccatagcagctacgctcacagccaaagcctggacc |
| | | | gactaatgaatccactcatcgaccaatacttgtactatctctcTaGAact |
| | | | attAACGGTTCTGGACAGAATCAAcaaacgctaaaattcagtgtggccgg |
| | | | acccagcaacatggctgtccagggaagaaactacatacctggacccagct |
| | | | accgacaacaacgtgtctcaaccactgtgactcaaaacaacaacagcgaa |
| | | | tttgcttggcctggagcttcttcttgggctctcaatggacgtaatagctt |
| | | | gatgaatcctggacctgctatggccagccacaaagaaggagaggaccgtt |
| | | | tctttcctttgtctggatctttaatttttggcaaacaaggTacCggCaga |
| | | | gacaacgtggatgcggacaaagtcatgataaccaacgaagaagaaattaa |
| | | | aactactaacccggtagcaacggagtcctatggacaagtggccacaaacc |
| | | | accagagtGCCCAAATGAACTCAACAATCTCCAAGGCTCAGGCGCAGacc |
| | | | ggttgggttcaaaaccaaggaatacttccgggtatggtttggcaggacag |
| | | | agatgtgtacctgcaaggacccatttgggccaaaattcctcacacggacg |
| | | | gcaactttcacccttctccgctgatgggagggtttggaatgaagcacccg |
| | | | cctcctcagatcctcatcaaaaacacacctgtacctgcggatcctccaac |
| | | | ggccttcaacaaggacaagctgaactctttcatcacccagtattctactg |
| | | | gccaagtcagcgtggagatcgagtgggagctgcagaaggaaaacagcaag |
| | | | cgctggaacccggagatccagtacacttccaactattacaagtctaataa |
| | | | tgttgaatttgctgttaatactgaaggtgtatatagtgaaccccgcccca |
| | | | ttggcaccagatacctgactcgtaatctg |
| 209 | DNA | Adeno- | atggctgccgatggttatcttccagattggctcgaggacaaccttagtga |
| | | Associated | aggaattcgcgagtggtgggctttgaaacctggagcccctcaacccaagg |
| | | Virus 9 | caaatcaacaacatcaagacaacgctcgaggtcttgtgcttccgggttac |
| | | comprising | aaataccttggacccggcaacggactcgacaagggggagccggtcaacgc |
| | | SEQ | agcagacgcggcggccctcgagcacgacaaggcctacgaccagcagctca |
| | | ID NO: 19 | aggccggagacaacccgtacctcaagtacaaccacgccgacgccgagttc |
| | | | caggagcggctcaaagaagatacgtcttttgggggcaacctcgggcgagc |
| | | | agtcttccaggccaaaaagaggcttcttgaacctcttggtctggttgagg |
| | | | aagcggctaagacggctcctggaaagaagaggcctgtagagcagtctcct |
| | | | caggaaccggactcctccgcgggtattggcaaatcgggtgcacagcccgc |
| | | | taaaaagagactcaatttcggtcagactggcgacacagagtcagtcccag |
| | | | accctcaaccaatcggagaacctcccgcagccccctcaggtgtgggatct |
| | | | cttacaatggcttcaggtggtggcgcaccagtggcagacaataacgaagg |
| | | | tgccgatggagtgggtagttcctcgggaaattggcattgcgattcccaat |
| | | | ggctgggggacagagtcatcaccaccagcacccgaacctgggccctgccc |
| | | | acctacaacaatcacctctacaagcaaatctccaacagcacatctggagg |
| | | | atcttcaaatgacaacgcctacttcggctacagcaccccctgggggtatt |
| | | | ttgacttcaacagattccactgccacttctcaccacgtgactggcagcga |
| | | | ctcatcaacaacaactggggattccggcctaagcgactcaacttcaagct |
| | | | cttcaacattcaggtcaaagaggttacggacaacaatggagtcaagacca |
| | | | tcgccaataaccttaccagcacggtccaggtcttcacggactcagactat |
| | | | cagctcccgtacgtgctcgggtcggctcacgagggctgcctcccgccgtt |
| | | | cccagcggacgttttcatgattcctcagtacgggtatctgacgcttaatg |
| | | | atggaagccaggccgtgggtcgttcgtccttttactgcctggaatatttc |
| | | | ccgtcgcaaatgctaagaacgggtaacaacttccagttcagctacgagtt |
| | | | tgagaacgtacctttccatagcagctacgctcacagccaaagcctggacc |
| | | | gactaatgaatccactcatcgaccaatacttgtactatctctcTaGAact |
| | | | attAACGGTTCTGGACAGAATCAAcaaacgctaaaattcagtgtggccgg |
| | | | acccagcaacatggctgtccagggaagaaactacatacctggacccagct |
| | | | accgacaacaacgtgtctcaaccactgtgactcaaaacaacaacagcgaa |
| | | | tttgcttggcctggagcttcttcttgggctctcaatggacgtaatagctt |
| | | | gatgaatcctggacctgctatggccagccacaaagaaggagaggaccgtt |
| | | | tctttcctttgtctggatctttaatttttggcaaacaaggTacCggCaga |
| | | | gacaacgtggatgcggacaaagtcatgataaccaacgaagaagaaattaa |
| | | | aactactaacccggtagcaacggagtcctatggacaagtggccacaaacc |
| | | | accagagtGCCCAAATGAACAGCACAATTTCAAAAGCGCAAGCGCAAacc |
| | | | ggttgggttcaaaaccaaggaatacttccgggtatggtttggcaggacag |
| | | | agatgtgtacctgcaaggacccatttgggccaaaattcctcacacggacg |
| | | | gcaactttcacccttctccgctgatgggagggtttggaatgaagcacccg |
| | | | cctcctcagatcctcatcaaaaacacacctgtacctgcggatcctccaac |
| | | | ggccttcaacaaggacaagctgaactctttcatcacccagtattctactg |
| | | | gccaagtcagcgtggagatcgagtgggagctgcagaaggaaaacagcaag |
| | | | cgctggaacccggagatccagtacacttccaactattacaagtctaataa |
| | | | tgttgaatttgctgttaatactgaaggtgtatatagtgaaccccgcccca |
| | | | ttggcaccagatacctgactcgtaatctg |
| 210 | DNA | Adeno- | atggctgccgatggttatcttccagattggctcgaggacaaccttagtga |
| | | Associated | aggaattcgcgagtggtgggctttgaaacctggagcccctcaacccaagg |
| | | Virus 9 | caaatcaacaacatcaagacaacgctcgaggtcttgtgcttccgggttac |
| | | comprising | aaataccttggacccggcaacggactcgacaagggggagccggtcaacgc |
| | | SEQ | agcagacgcggcggccctcgagcacgacaaggcctacgaccagcagctca |
| | | ID NO: 19 | aggccggagacaacccgtacctcaagtacaaccacgccgacgccgagttc |
| | | | caggagcggctcaaagaagatacgtcttttgggggcaacctcgggcgagc |
| | | | agtcttccaggccaaaaagaggcttcttgaacctcttggtctggttgagg |
| | | | aagcggctaagacggctcctggaaagaagaggcctgtagagcagtctcct |
| | | | caggaaccggactcctccgcgggtattggcaaatcgggtgcacagcccgc |
| | | | taaaaagagactcaatttcggtcagactggcgacacagagtcagtcccag |
| | | | accctcaaccaatcggagaacctcccgcagccccctcaggtgtgggatct |
| | | | cttacaatggcttcaggtggtggcgcaccagtggcagacaataacgaagg |
| | | | tgccgatggagtgggtagttcctcgggaaattggcattgcgattcccaat |
| | | | ggctgggggacagagtcatcaccaccagcacccgaacctgggccctgccc |
| | | | acctacaacaatcacctctacaagcaaatctccaacagcacatctggagg |
| | | | atcttcaaatgacaacgcctacttcggctacagcaccccctgggggtatt |
| | | | ttgacttcaacagattccactgccacttctcaccacgtgactggcagcga |
| | | | ctcatcaacaacaactggggattccggcctaagcgactcaacttcaagct |
| | | | cttcaacattcaggtcaaagaggttacggacaacaatggagtcaagacca |
| | | | tcgccaataaccttaccagcacggtccaggtcttcacggactcagactat |
| | | | cagctcccgtacgtgctcgggtcggctcacgagggctgcctcccgccgtt |
| | | | cccagcggacgttttcatgattcctcagtacgggtatctgacgcttaatg |
| | | | atggaagccaggccgtgggtcgttcgtccttttactgcctggaatatttc |
| | | | ccgtcgcaaatgctaagaacgggtaacaacttccagttcagctacgagtt |
| | | | tgagaacgtacctttccatagcagctacgctcacagccaaagcctggacc |
| | | | gactaatgaatccactcatcgaccaatacttgtactatctctcTaGAact |
| | | | attAACGGTTCTGGACAGAATCAAcaaacgctaaaattcagtgtggccgg |
| | | | acccagcaacatggctgtccagggaagaaactacatacctggacccagct |
| | | | accgacaacaacgtgtctcaaccactgtgactcaaaacaacaacagcgaa |
| | | | tttgcttggcctggagcttcttcttgggctctcaatggacgtaatagctt |
| | | | gatgaatcctggacctgctatggccagccacaaagaaggagaggaccgtt |
| | | | tctttcctttgtctggatctttaatttttggcaaacaaggTacCggCaga |
| | | | gacaacgtggatgcggacaaagtcatgataaccaacgaagaagaaattaa |
| | | | aactactaacccggtagcaacggagtcctatggacaagtggccacaaacc |
| | | | accagagtGCCCAGATGAATTCAACTATTAGTAAAGCTCAGGCGCAAacc |
| | | | ggttgggttcaaaaccaaggaatacttccgggtatggtttggcaggacag |
| | | | agatgtgtacctgcaaggacccatttgggccaaaattcctcacacggacg |
| | | | gcaactttcacccttctccgctgatgggagggtttggaatgaagcacccg |
| | | | cctcctcagatcctcatcaaaaacacacctgtacctgcggatcctccaac |
| | | | ggccttcaacaaggacaagctgaactctttcatcacccagtattctactg |
| | | | gccaagtcagcgtggagatcgagtgggagctgcagaaggaaaacagcaag |
| | | | cgctggaacccggagatccagtacacttccaactattacaagtctaataa |
| | | | tgttgaatttgctgttaatactgaaggtgtatatagtgaaccccgcccca |
| | | | ttggcaccagatacctgactcgtaatctg |
| 211 | DNA | Adeno- | atggctgccgatggttatcttccagattggctcgaggacaaccttagtga |
| | | Associated | aggaattcgcgagtggtgggctttgaaacctggagcccctcaacccaagg |
| | | Virus 9 | caaatcaacaacatcaagacaacgctcgaggtcttgtgcttccgggttac |
| | | comprising | aaataccttggacccggcaacggactcgacaagggggagccggtcaacgc |
| | | SEQ | agcagacgcggcggccctcgagcacgacaaggcctacgaccagcagctca |
| | | ID NO: 20 | aggccggagacaacccgtacctcaagtacaaccacgccgacgccgagttc |
| | | | caggagcggctcaaagaagatacgtcttttgggggcaacctcgggcgagc |
| | | | agtcttccaggccaaaaagaggcttcttgaacctcttggtctggttgagg |
| | | | aagcggctaagacggctcctggaaagaagaggcctgtagagcagtctcct |
| | | | caggaaccggactcctccgcgggtattggcaaatcgggtgcacagcccgc |
| | | | taaaaagagactcaatttcggtcagactggcgacacagagtcagtcccag |
| | | | accctcaaccaatcggagaacctcccgcagccccctcaggtgtgggatct |
| | | | cttacaatggcttcaggtggtggcgcaccagtggcaga\caataacgaag |
| | | | gtgccgatggagtgggtagttcctcgggaaattggcattgcgattcccaa |
| | | | tggctgggggacagagtcatcaccaccagcacccgaacctgggccctgcc |
| | | | cacctacaacaatcacctctacaagcaaatctccaacagcacatctggag |
| | | | gatcttcaaatgacaacgcctacttcggctacagcaccccctgggggtat |
| | | | tttgacttcaacagattccactgccacttctcaccacgtgactggcagcg |
| | | | actcatcaacaacaactggggattccggcctaagcgactcaacttcaagc |
| | | | tcttcaacattcaggtcaaagaggttacggacaacaatggagtcaagacc |
| | | | atcgccaataaccttaccagcacggtccaggtcttcacggactcagacta |
| | | | tcagctcccgtacgtgctcgggtcggctcacgagggctgcctcccgccgt |
| | | | tcccagcggacgttttcatgattcctcagtacgggtatctgacgcttaat |
| | | | gatggaagccaggccgtgggtcgttcgtccttttactgcctggaatattt |
| | | | cccgtcgcaaatgctaagaacgggtaacaacttccagttcagctacgagt |
| | | | ttgagaacgtacctttccatagcagctacgctcacagccaaagcctggac |
| | | | cgactaatgaatccactcatcgaccaatacttgtactatctctcTaGAac |
| | | | tattAACGGTTCTGGACAGAATCAAcaaacgctaaaattcagtgtggccg |
| | | | gacccagcaacatggctgtccagggaagaaactacatacctggacccagc |
| | | | taccgacaacaacgtgtctcaaccactgtgactcaaaacaacaacagcga |
| | | | atttgcttggcctggagcttcttcttgggctctcaatggacgtaatagct |
| | | | tgatgaatcctggacctgctatggccagccacaaagaaggagaggaccgt |
| | | | ttctttcctttgtctggatctttaatttttggcaaacaaggTacCggCag |
| | | | agacaacgtggatgcggacaaagtcatgataaccaacgaagaagaaatta |
| | | | aaactactaacccggtagcaacggagtcctatggacaagtggccacaaac |
| | | | caccagagtGCACAAAACGGGAAGGCAGACCCTCGGGCTCAAGCACAAac |
| | | | cggttgggttcaaaaccaaggaatacttccgggtatggtttggcaggaca |
| | | | gagatgtgtacctgcaaggacccatttgggccaaaattcctcacacggac |
| | | | ggcaactttcacccttctccgctgatgggagggtttggaatgaagcaccc |
| | | | gcctcctcagatcctcatcaaaaacacacctgtacctgcggatcctccaa |
| | | | cggccttcaacaaggacaagctgaactctttcatcacccagtattctact |
| | | | ggccaagtcagcgtggagatcgagtgggagctgcagaaggaaaacagcaa |
| | | | gcgctggaacccggagatccagtacacttccaactattacaagtctaata |
| | | | atgttgaatttgctgttaatactgaaggtgtatatagtgaaccccgcccc |
| | | | attggcaccagatacctgactcgtaatctg |
| 212 | DNA | Adeno- | atggctgccgatggttatcttccagattggctcgaggacaaccttagtga |
| | | Associated | aggaattcgcgagtggtgggctttgaaacctggagcccctcaacccaagg |
| | | Virus 9 | caaatcaacaacatcaagacaacgctcgaggtcttgtgcttccgggttac |
| | | comprising | aaataccttggacccggcaacggactcgacaagggggagccggtcaacgc |
| | | SEQ | agcagacgcggcggccctcgagcacgacaaggcctacgaccagcagctca |
| | | ID NO: 20 | aggccggagacaacccgtacctcaagtacaaccacgccgacgccgagttc |
| | | | caggagcggctcaaagaagatacgtcttttgggggcaacctcgggcgagc |
| | | | agtcttccaggccaaaaagaggcttcttgaacctcttggtctggttgagg |
| | | | aagcggctaagacggctcctggaaagaagaggcctgtagagcagtctcct |
| | | | caggaaccggactcctccgcgggtattggcaaatcgggtgcacagcccgc |
| | | | taaaaagagactcaatttcggtcagactggcgacacagagtcagtcccag |
| | | | accctcaaccaatcggagaacctcccgcagccccctcaggtgtgggatct |
| | | | cttacaatggcttcaggtggtggcgcaccagtggcagacaataacgaagg |
| | | | tgccgatggagtgggtagttcctcgggaaattggcattgcgattcccaat |
| | | | ggctgggggacagagtcatcaccaccagcacccgaacctgggccctgccc |
| | | | acctacaacaatcacctctacaagcaaatctccaacagcacatctggagg |
| | | | atcttcaaatgacaacgcctacttcggctacagcaccccctgggggtatt |
| | | | ttgacttcaacagattccactgccacttctcaccacgtgactggcagcga |
| | | | ctcatcaacaacaactggggattccggcctaagcgactcaacttcaagct |
| | | | cttcaacattcaggtcaaagaggttacggacaacaatggagtcaagacca |
| | | | tcgccaataaccttaccagcacggtccaggtcttcacggactcagactat |
| | | | cagctcccgtacgtgctcgggtcggctcacgagggctgcctcccgccgtt |
| | | | cccagcggacgttttcatgattcctcagtacgggtatctgacgcttaatg |
| | | | atggaagccaggccgtgggtcgttcgtccttttactgcctggaatatttc |
| | | | ccgtcgcaaatgctaagaacgggtaacaacttccagttcagctacgagtt |
| | | | tgagaacgtacctttccatagcagctacgctcacagccaaagcctggacc |
| | | | gactaatgaatccactcatcgaccaatacttgtactatctctcTaGAact |
| | | | attAACGGTTCTGGACAGAATCAAcaaacgctaaaattcagtgtggccgg |
| | | | acccagcaacatggctgtccagggaagaaactacatacctggacccagct |
| | | | accgacaacaacgtgtctcaaccactgtgactcaaaacaacaacagcgaa |
| | | | tttgcttggcctggagcttcttcttgggctctcaatggacgtaatagctt |
| | | | gatgaatcctggacctgctatggccagccacaaagaaggagaggaccgtt |
| | | | tctttcctttgtctggatctttaatttttggcaaacaaggTacCggCaga |
| | | | gacaacgtggatgcggacaaagtcatgataaccaacgaagaagaaattaa |
| | | | aactactaacccggtagcaacggagtcctatggacaagtggccacaaacc |
| | | | accagagtGCGCAGAACGGAAAGGCAGATCCACGAGCTCAGGCACAAacc |
| | | | ggttgggttcaaaaccaaggaatacttccgggtatggtttggcaggacag |
| | | | agatgtgtacctgcaaggacccatttgggccaaaattcctcacacggacg |
| | | | gcaactttcacccttctccgctgatgggagggtttggaatgaagcacccg |
| | | | cctcctcagatcctcatcaaaaacacacctgtacctgcggatcctccaac |
| | | | ggccttcaacaaggacaagctgaactctttcatcacccagtattctactg |
| | | | gccaagtcagcgtggagatcgagtgggagctgcagaaggaaaacagcaag |
| | | | cgctggaacccggagatccagtacacttccaactattacaagtctaataa |
| | | | tgttgaatttgctgttaatactgaaggtgtatatagtgaaccccgcccca |
| | | | ttggcaccagatacctgactcgtaatctg |
| 213 | DNA | Adeno- | atggctgccgatggttatcttccagattggctcgaggacaaccttagtga |
| | | Associated | aggaattcgcgagtggtgggctttgaaacctggagcccctcaacccaagg |
| | | Virus 9 | caaatcaacaacatcaagacaacgctcgaggtcttgtgcttccgggttac |
| | | comprising | aaataccttggacccggcaacggactcgacaagggggagccggtcaacgc |
| | | SEQ | agcagacgcggcggccctcgagcacgacaaggcctacgaccagcagctca |
| | | ID NO: 20 | aggccggagacaacccgtacctcaagtacaaccacgccgacgccgagttc |
| | | | caggagcggctcaaagaagatacgtcttttgggggcaacctcgggcgagc |
| | | | agtcttccaggccaaaaagaggcttcttgaacctcttggtctggttgagg |
| | | | aagcggctaagacggctcctggaaagaagaggcctgtagagcagtctcct |
| | | | caggaaccggactcctccggggtattggcaaatcgggtgcacagcccgct |
| | | | aaaaagagactcaatttcggtcagactggcgacacagagtcagtcccaga |
| | | | ccctcaaccaatcggagaacctcccgcagccccctcaggtgtgggatctc |
| | | | ttacaatggcttcaggtggtggcgcaccagtggcagacaataacgaaggt |
| | | | gccgatggagtgggtagttcctcgggaaattggcattgcgattcccaatg |
| | | | gctgggggacagagtcatcaccaccagcacccgaacctgggccctgccca |
| | | | cctacaacaatcacctctacaagcaaatctccaacagcacatctggagga |
| | | | tcttcaaatgacaacgcctacttcggctacagcaccccctgggggtattt |
| | | | tgacttcaacagattccactgccacttctcaccacgtgactggcagcgac |
| | | | tcatcaacaacaactggggattccggcctaagcgactcaacttcaagctc |
| | | | ttcaacattcaggtcaaagaggttacggacaacaatggagtcaagaccat |
| | | | cgccaataaccttaccagcacggtccaggtcttcacggactcagactatc |
| | | | agctcccgtacgtgctcgggtcggctcacgagggctgcctcccgccgttc |
| | | | ccagcggacgttttcatgattcctcagtacgggtatctgacgcttaatga |
| | | | tggaagccaggccgtgggtcgttcgtccttttactgcctggaatatttcc |
| | | | cgtcgcaaatgctaagaacgggtaacaacttccagttcagctacgagttt |
| | | | gagaacgtacctttccatagcagctacgctcacagccaaagcctggaccg |
| | | | actaatgaatccactcatcgaccaatacttgtactatctctcTaGAacta |
| | | | ttAACGGTTCTGGACAGAATCAAcaaacgctaaaattcagtgtggccgga |
| | | | cccagcaacatggctgtccagggaagaaactacatacctggacccagcta |
| | | | ccgacaacaacgtgtctcaaccactgtgactcaaaacaacaacagcgaat |
| | | | ttgcttggcctggagcttcttcttgggctctcaatggacgtaatagcttg |
| | | | atgaatcctggacctgctatggccagccacaaagaaggagaggaccgttt |
| | | | ctttcctttgtctggatctttaatttttggcaaacaaggTacCggCagag |
| | | | acaacgtggatgcggacaaagtcatgataaccaacgaagaagaaattaaa |
| | | | actactaacccggtagcaacggagtcctatggacaagtggccacaaacca |
| | | | ccagagtGCGCAGAATGGCAAGGCAGACCCGCGAGCCCAGGCACAGaccg |
| | | | gttgggttcaaaaccaaggaatacttccgggtatggtttggcaggacaga |
| | | | gatgtgtacctgcaaggacccatttgggccaaaattcctcacacggacgg |
| | | | caactttcacccttctccgctgatgggagggtttggaatgaagcacccgc |
| | | | ctcctcagatcctcatcaaaaacacacctgtacctgcggatcctccaacg |
| | | | gccttcaacaaggacaagctgaactctttcatcacccagtattctactgg |
| | | | ccaagtcagcgtggagatcgagtgggagctgcagaaggaaaacagcaagc |
| | | | gctggaacccggagatccagtacacttccaactattacaagtctaataat |
| | | | gttgaatttgctgttaatactgaaggtgtatatagtgaaccccgccccat |
| | | | tggcaccagatacctgactcgtaatctg |
| 214 | DNA | Adeno- | atggctgccgatggttatcttccagattggctcgaggacaaccttagtga |
| | | Associated | aggaattcgcgagtggtgggctttgaaacctggagcccctcaacccaagg |
| | | Virus 9 | caaatcaacaacatcaagacaacgctcgaggtcttgtgcttccgggttac |
| | | comprising | aaataccttggacccggcaacggactcgacaagggggagccggtcaacgc |
| | | SEQ | agcagacgcggcggccctcgagcacgacaaggcctacgaccagcagctca |
| | | ID NO: 20 | aggccggagacaacccgtacctcaagtacaaccacgccgacgccgagttc |
| | | | caggagcggctcaaagaagatacgtcttttgggggcaacctcgggcgagc |
| | | | agtcttccaggccaaaaagaggcttcttgaacctcttggtctggttgagg |
| | | | aagcggctaagacggctcctggaaagaagaggcctgtagagcagtctcct |
| | | | caggaaccggactcctccgcgggtattggcaaatcgggtgcacagcccgc |
| | | | taaaaagagactcaatttcggtcagactggcgacacagagtcagtcccag |
| | | | accctcaaccaatcggagaacctcccgcagccccctcaggtgtgggatct |
| | | | cttacaatggcttcaggtggtggcgcaccagtggcagacaataacgaagg |
| | | | tgccgatggagtgggtagttcctcgggaaattggcattgcgattcccaat |
| | | | ggctgggggacagagtcatcaccaccagcacccgaacctgggccctgccc |
| | | | acctacaacaatcacctctacaagcaaatctccaacagcacatctggagg |
| | | | atcttcaaatgacaacgcctacttcggctacagcaccccctgggggtatt |
| | | | ttgacttcaacagattccactgccacttctcaccacgtgactggcagcga |
| | | | ctcatcaacaacaactggggattccggcctaagcgactcaacttcaagct |
| | | | cttcaacattcaggtcaaagaggttacggacaacaatggagtcaagacca |
| | | | tcgccaataaccttaccagcacggtccaggtcttcacggactcagactat |
| | | | cagctcccgtacgtgctcgggtcggctcacgagggctgcctcccgccgtt |
| | | | cccagcggacgttttcatgattcctcagtacgggtatctgacgcttaatg |
| | | | atggaagccaggccgtgggtcgttcgtccttttactgcctggaatatttc |
| | | | ccgtcgcaaatgctaagaacgggtaacaacttccagttcagctacgagtt |
| | | | tgagaacgtacctttccatagcagctacgctcacagccaaagcctggacc |
| | | | gactaatgaatccactcatcgaccaatacttgtactatctctcTaGAact |
| | | | attAACGGTTCTGGACAGAATCAAcaaacgctaaaattcagtgtggccgg |
| | | | acccagcaacatggctgtccagggaagaaactacatacctggacccagct |
| | | | accgacaacaacgtgtctcaaccactgtgactcaaaacaacaacagcgaa |
| | | | tttgcttggcctggagcttcttcttgggctctcaatggacgtaatagctt |
| | | | gatgaatcctggacctgctatggccagccacaaagaaggagaggaccgtt |
| | | | tctttcctttgtctggatctttaatttttggcaaacaaggTacCggCaga |
| | | | gacaacgtggatgcggacaaagtcatgataaccaacgaagaagaaattaa |
| | | | aactactaacccggtagcaacggagtcctatggacaagtggccacaaacc |
| | | | accagagtGCACAGAATGGAAAAGCAGACCCACGTGCCCAAGCACAAacc |
| | | | ggttgggttcaaaaccaaggaatacttccgggtatggtttggcaggacag |
| | | | agatgtgtacctgcaaggacccatttgggccaaaattcctcacacggacg |
| | | | gcaactttcacccttctccgctgatgggagggtttggaatgaagcacccg |
| | | | cctcctcagatcctcatcaaaaacacacctgtacctgcggatcctccaac |
| | | | ggccttcaacaaggacaagctgaactctttcatcacccagtattctactg |
| | | | gccaagtcagcgtggagatcgagtgggagctgcagaaggaaaacagcaag |
| | | | cgctggaacccggagatccagtacacttccaactattacaagtctaataa |
| | | | tgttgaatttgctgttaatactgaaggtgtatatagtgaaccccgcccca |
| | | | ttggcaccagatacctgactcgtaatctg |
| 215 | DNA | Adeno- | atggctgccgatggttatcttccagattggctcgaggacaaccttagtga |
| | | Associated | aggaattcgcgagtggtgggctttgaaacctggagcccctcaacccaagg |
| | | Virus 9 | caaatcaacaacatcaagacaacgctcgaggtcttgtgcttccgggttac |
| | | comprising | aaataccttggacccggcaacggactcgacaagggggagccggtcaacgc |
| | | SEQ | agcagacgcggcggccctcgagcacgacaaggcctacgaccagcagctca |
| | | ID NO: 20 | aggccggagacaacccgtacctcaagtacaaccacgccgacgccgagttc |
| | | | caggagcggctcaaagaagatacgtcttttgggggcaacctcgggcgagc |
| | | | agtcttccaggccaaaaagaggcttcttgaacctcttggtctggttgagg |
| | | | aagcggctaagacggctcctggaaagaagaggcctgtagagcagtctcct |
| | | | caggaaccggactcctccgcgggtattggcaaatcgggtgcacagcccgc |
| | | | taaaaagagactcaatttcggtcagactggcgacacagagtcagtcccag |
| | | | accctcaaccaatcggagaacctcccgcagccccctcaggtgtgggatct |
| | | | cttacaatggcttcaggtggtggcgcaccagtggcagacaataacgaagg |
| | | | tgccgatggagtgggtagttcctcgggaaattggcattgcgattcccaat |
| | | | ggctgggggacagagtcatcaccaccagcacccgaacctgggccctgccc |
| | | | acctacaacaatcacctctacaagcaaatctccaacagcacatctggagg |
| | | | atcttcaaatgacaacgcctacttcggctacagcaccccctgggggtatt |
| | | | ttgacttcaacagattccactgccacttctcaccacgtgactggcagcga |
| | | | ctcatcaacaacaactggggattccggcctaagcgactcaacttcaagct |
| | | | cttcaacattcaggtcaaagaggttacggacaacaatggagtcaagacca |
| | | | tcgccaataaccttaccagcacggtccaggtcttcacggactcagactat |
| | | | cagctcccgtacgtgctcgggtcggctcacgagggctgcctcccgccgtt |
| | | | cccagcggacgttttcatgattcctcagtacgggtatctgacgcttaatg |
| | | | atggaagccaggccgtgggtcgttcgtccttttactgcctggaatatttc |
| | | | ccgtcgcaaatgctaagaacgggtaacaacttccagttcagctacgagtt |
| | | | tgagaacgtacctttccatagcagctacgctcacagccaaagcctggacc |
| | | | gactaatgaatccactcatcgaccaatacttgtactatctctcTaGAact |
| | | | attAACGGTTCTGGACAGAATCAAcaaacgctaaaattcagtgtggccgg |
| | | | acccagcaacatggctgtccagggaagaaactacatacctggacccagct |
| | | | accgacaacaacgtgtctcaaccactgtgactcaaaacaacaacagcgaa |
| | | | tttgcttggcctggagcttcttcttgggctctcaatggacgtaatagctt |
| | | | gatgaatcctggacctgctatggccagccacaaagaaggagaggaccgtt |
| | | | tctttcctttgtctggatctttaatttttggcaaacaaggTacCggCaga |
| | | | gacaacgtggatgcggacaaagtcatgataaccaacgaagaagaaattaa |
| | | | aactactaacccggtagcaacggagtcctatggacaagtggccacaaacc |
| | | | accagagtGCCCAAAATGGTAAAGCCGATCCGCGTGCGCAAGCACAGacc |
| | | | ggttgggttcaaaaccaaggaatacttccgggtatggtttggcaggacag |
| | | | agatgtgtacctgcaaggacccatttgggccaaaattcctcacacggacg |
| | | | gcaactttcacccttctccgctgatgggagggtttggaatgaagcacccg |
| | | | cctcctcagatcctcatcaaaaacacacctgtacctgcggatcctccaac |
| | | | ggccttcaacaaggacaagctgaactctttcatcacccagtattctactg |
| | | | gccaagtcagcgtggagatcgagtgggagctgcagaaggaaaacagcaag |
| | | | cgctggaacccggagatccagtacacttccaactattacaagtctaataa |
| | | | tgttgaatttgctgttaatactgaaggtgtatatagtgaaccccgcccca |
| | | | ttggcaccagatacctgactcgtaatctg |
| 216 | DNA | Adeno- | atggctgccgatggttatcttccagattggctcgaggacaaccttagtga |
| | | Associated | aggaattcgcgagtggtgggctttgaaacctggagcccctcaacccaagg |
| | | Virus 9 | caaatcaacaacatcaagacaacgctcgaggtcttgtgcttccgggttac |
| | | comprising | aaataccttggacccggcaacggactcgacaagggggagccggtcaacgc |
| | | SEQ | agcagacgcggcggccctcgagcacgacaaggcctacgaccagcagctca |
| | | ID NO: 20 | aggccggagacaacccgtacctcaagtacaaccacgccgacgccgagttc |
| | | | caggagcggctcaaagaagatacgtcttttgggggcaacctcgggcgagc |
| | | | agtcttccaggccaaaaagaggcttcttgaacctcttggtctggttgagg |
| | | | aagcggctaagacggctcctggaaagaagaggcctgtagagcagtctcct |
| | | | caggaaccggactcctccgcgggtattggcaaatcgggtgcacagcccgc |
| | | | taaaaagagactcaatttcggtcagactggcgacacagagtcagtcccag |
| | | | accctcaaccaatcggagaacctcccgcagccccctcaggtgtgggatct |
| | | | cttacaatggcttcaggtggtggcgcaccagtggcagacaataacgaagg |
| | | | tgccgatggagtgggtagttcctcgggaaattggcattgcgattcccaat |
| | | | ggctgggggacagagtcatcaccaccagcacccgaacctgggccctgccc |
| | | | acctacaacaatcacctctacaagcaaatctccaacagcacatctggagg |
| | | | atcttcaaatgacaacgcctacttcggctacagcaccccctgggggtatt |
| | | | ttgacttcaacagattccactgccacttctcaccacgtgactggcagcga |
| | | | ctcatcaacaacaactggggattccggcctaagcgactcaacttcaagct |
| | | | cttcaacattcaggtcaaagaggttacggacaacaatggagtcaagacca |
| | | | tcgccaataaccttaccagcacggtccaggtcttcacggactcagactat |
| | | | cagctcccgtacgtgctcgggtcggctcacgagggctgcctcccgccgtt |
| | | | cccagcggacgttttcatgattcctcagtacgggtatctgacgcttaatg |
| | | | atggaagccaggccgtgggtcgttcgtccttttactgcctggaatatttc |
| | | | ccgtcgcaaatgctaagaacgggtaacaacttccagttcagctacgagtt |
| | | | tgagaacgtacctttccatagcagctacgctcacagccaaagcctggacc |
| | | | gactaatgaatccactcatcgaccaatacttgtactatctctcTaGAact |
| | | | attAACGGTTCTGGACAGAATCAAcaaacgctaaaattcagtgtggccgg |
| | | | acccagcaacatggctgtccagggaagaaactacatacctggacccagct |
| | | | accgacaacaacgtgtctcaaccactgtgactcaaaacaacaacagcgaa |
| | | | tttgcttggcctggagcttcttcttgggctctcaatggacgtaatagctt |
| | | | gatgaatcctggacctgctatggccagccacaaagaaggagaggaccgtt |
| | | | tctttcctttgtctggatctttaatttttggcaaacaaggTacCggCaga |
| | | | gacaacgtggatgcggacaaagtcatgataaccaacgaagaagaaattaa |
| | | | aactactaacccggtagcaacggagtcctatggacaagtggccacaaacc |
| | | | accagagtGCTCAGAATGGTAAAGCCGATCCACGAGCACAGGCTCAGacc |
| | | | ggttgggttcaaaaccaaggaatacttccgggtatggtttggcaggacag |
| | | | agatgtgtacctgcaaggacccatttgggccaaaattcctcacacggacg |
| | | | gcaactttcacccttctccgctgatgggagggtttggaatgaagcacccg |
| | | | cctcctcagatcctcatcaaaaacacacctgtacctgcggatcctccaac |
| | | | ggccttcaacaaggacaagctgaactctttcatcacccagtattctactg |
| | | | gccaagtcagcgtggagatcgagtgggagctgcagaaggaaaacagcaag |
| | | | cgctggaacccggagatccagtacacttccaactattacaagtctaataa |
| | | | tgttgaatttgctgttaatactgaaggtgtatatagtgaaccccgcccca |
| | | | ttggcaccagatacctgactcgtaatctg |
| 217 | DNA | Adeno- | atggctgccgatggttatcttccagattggctcgaggacaaccttagtga |
| | | Associated | aggaattcgcgagtggtgggctttgaaacctggagcccctcaacccaagg |
| | | Virus 9 | caaatcaacaacatcaagacaacgctcgaggtcttgtgcttccgggttac |
| | | comprising | aaataccttggacccggcaacggactcgacaagggggagccggtcaacgc |
| | | SEQ | agcagacgcggcggccctcgagcacgacaaggcctacgaccagcagctca |
| | | ID NO: 20 | aggccggagacaacccgtacctcaagtacaaccacgccgacgccgagttc |
| | | | caggagcggctcaaagaagatacgtcttttgggggcaacctcgggcgagc |
| | | | agtcttccaggccaaaaagaggcttcttgaacctcttggtctggttgagg |
| | | | aagcggctaagacggctcctggaaagaagaggcctgtagagcagtctcct |
| | | | caggaaccggactcctccgcgggtattggcaaatcgggtgcacagcccgc |
| | | | taaaaagagactcaatttcggtcagactggcgacacagagtcagtcccag |
| | | | accctcaaccaatcggagaacctcccgcagccccctcaggtgtgggatct |
| | | | cttacaatggcttcaggtggtggcgcaccagtggcagacaataacgaagg |
| | | | tgccgatggagtgggtagttcctcgggaaattggcattgcgattcccaat |
| | | | ggctgggggacagagtcatcaccaccagcacccgaacctgggccctgccc |
| | | | acctacaacaatcacctctacaagcaaatctccaacagcacatctggagg |
| | | | atcttcaaatgacaacgcctacttcggctacagcaccccctgggggtatt |
| | | | ttgacttcaacagattccactgccacttctcaccacgtgactggcagcga |
| | | | ctcatcaacaacaactggggattccggcctaagcgactcaacttcaagct |
| | | | cttcaacattcaggtcaaagaggttacggacaacaatggagtcaagacca |
| | | | tcgccaataaccttaccagcacggtccaggtcttcacggactcagactat |
| | | | cagctcccgtacgtgctcgggtcggctcacgagggctgcctcccgccgtt |
| | | | cccagcggacgttttcatgattcctcagtacgggtatctgacgcttaatg |
| | | | atggaagccaggccgtgggtcgttcgtccttttactgcctggaatatttc |
| | | | ccgtcgcaaatgctaagaacgggtaacaacttccagttcagctacgagtt |
| | | | tgagaacgtacctttccatagcagctacgctcacagccaaagcctggacc |
| | | | gactaatgaatccactcatcgaccaatacttgtactatctctcTaGAact |
| | | | attAACGGTTCTGGACAGAATCAAcaaacgctaaaattcagtgtggccgg |
| | | | acccagcaacatggctgtccagggaagaaactacatacctggacccagct |
| | | | accgacaacaacgtgtctcaaccactgtgactcaaaacaacaacagcgaa |
| | | | tttgcttggcctggagcttcttcttgggctctcaatggacgtaatagctt |
| | | | gatgaatcctggacctgctatggccagccacaaagaaggagaggaccgtt |
| | | | tctttcctttgtctggatctttaatttttggcaaacaaggTacCggCaga |
| | | | gacaacgtggatgcggacaaagtcatgataaccaacgaagaagaaattaa |
| | | | aactactaacccggtagcaacggagtcctatggacaagtggccacaaacc |
| | | | accagagtGCGCAGAACGGGAAGGCAGACCCTCGAGCACAGGCCCAAacc |
| | | | ggttgggttcaaaaccaaggaatacttccgggtatggtttggcaggacag |
| | | | agatgtgtacctgcaaggacccatttgggccaaaattcctcacacggacg |
| | | | gcaactttcacccttctccgctgatgggagggtttggaatgaagcacccg |
| | | | cctcctcagatcctcatcaaaaacacacctgtacctgcggatcctccaac |
| | | | ggccttcaacaaggacaagctgaactctttcatcacccagtattctactg |
| | | | gccaagtcagcgtggagatcgagtgggagctgcagaaggaaaacagcaag |
| | | | cgctggaacccggagatccagtacacttccaactattacaagtctaataa |
| | | | tgttgaatttgctgttaatactgaaggtgtatatagtgaaccccgcccca |
| | | | ttggcaccagatacctgactcgtaatctg |
| 218 | DNA | Adeno- | atggctgccgatggttatcttccagattggctcgaggacaaccttagtga |
| | | Associated | aggaattcgcgagtggtgggctttgaaacctggagcccctcaacccaagg |
| | | Virus 9 | caaatcaacaacatcaagacaacgctcgaggtcttgtgcttccgggttac |
| | | comprising | aaataccttggacccggcaacggactcgacaagggggagccggtcaacgc |
| | | SEQ | agcagacgcggcggccctcgagcacgacaaggcctacgaccagcagctca |
| | | ID NO: 20 | aggccggagacaacccgtacctcaagtacaaccacgccgacgccgagttc |
| | | | caggagcggctcaaagaagatacgtcttttgggggcaacctcgggcgagc |
| | | | agtcttccaggccaaaaagaggcttcttgaacctcttggtctggttgagg |
| | | | aagcggctaagacggctcctggaaagaagaggcctgtagagcagtctcct |
| | | | caggaaccggactcctccgcgggtattggcaaatcgggtgcacagcccgc |
| | | | taaaaagagactcaatttcggtcagactggcgacacagagtcagtcccag |
| | | | accctcaaccaatcggagaacctcccgcagccccctcaggtgtgggatct |
| | | | cttacaatggcttcaggtggtggcgcaccagtggcagacaataacgaagg |
| | | | tgccgatggagtgggtagttcctcgggaaattggcattgcgattcccaat |
| | | | ggctgggggacagagtcatcaccaccagcacccgaacctgggccctgccc |
| | | | acctacaacaatcacctctacaagcaaatctccaacagcacatctggagg |
| | | | atcttcaaatgacaacgcctacttcggctacagcaccccctgggggtatt |
| | | | ttgacttcaacagattccactgccacttctcaccacgtgactggcagcga |
| | | | ctcatcaacaacaactggggattccggcctaagcgactcaacttcaagct |
| | | | cttcaacattcaggtcaaagaggttacggacaacaatggagtcaagacca |
| | | | tcgccaataaccttaccagcacggtccaggtcttcacggactcagactat |
| | | | cagctcccgtacgtgctcgggtcggctcacgagggctgcctcccgccgtt |
| | | | cccagcggacgttttcatgattcctcagtacgggtatctgacgcttaatg |
| | | | atggaagccaggccgtgggtcgttcgtccttttactgcctggaatatttc |
| | | | ccgtcgcaaatgctaagaacgggtaacaacttccagttcagctacgagtt |
| | | | tgagaacgtacctttccatagcagctacgctcacagccaaagcctggacc |
| | | | gactaatgaatccactcatcgaccaatacttgtactatctctcTaGAact |
| | | | attAACGGTTCTGGACAGAATCAAcaaacgctaaaattcagtgtggccgg |
| | | | acccagcaacatggctgtccagggaagaaactacatacctggacccagct |
| | | | accgacaacaacgtgtctcaaccactgtgactcaaaacaacaacagcgaa |
| | | | tttgcttggcctggagcttcttcttgggctctcaatggacgtaatagctt |
| | | | gatgaatcctggacctgctatggccagccacaaagaaggagaggaccgtt |
| | | | tctttcctttgtctggatctttaatttttggcaaacaaggTacCggCaga |
| | | | gacaacgtggatgcggacaaagtcatgataaccaacgaagaagaaattaa |
| | | | aactactaacccggtagcaacggagtcctatggacaagtggccacaaacc |
| | | | accagagtGCCCAAAACGGAAAAGCCGATCCACGGGCGCAAGCCCAAacc |
| | | | ggttgggttcaaaaccaaggaatacttccgggtatggtttggcaggacag |
| | | | agatgtgtacctgcaaggacccatttgggccaaaattcctcacacggacg |
| | | | gcaactttcacccttctccgctgatgggagggtttggaatgaagcacccg |
| | | | cctcctcagatcctcatcaaaaacacacctgtacctgcggatcctccaac |
| | | | ggccttcaacaaggacaagctgaactctttcatcacccagtattctactg |
| | | | gccaagtcagcgtggagatcgagtgggagctgcagaaggaaaacagcaag |
| | | | cgctggaacccggagatccagtacacttccaactattacaagtctaataa |
| | | | tgttgaatttgctgttaatactgaaggtgtatatagtgaaccccgcccca |
| | | | ttggcaccagatacctgactcgtaatctg |
| 219 | DNA | Adeno- | atggctgccgatggttatcttccagattggctcgaggacaaccttagtga |
| | | Associated | aggaattcgcgagtggtgggctttgaaacctggagcccctcaacccaagg |
| | | Virus 9 | caaatcaacaacatcaagacaacgctcgaggtcttgtgcttccgggttac |
| | | comprising | aaataccttggacccggcaacggactcgacaagggggagccggtcaacgc |
| | | SEQ | agcagacgcggcggccctcgagcacgacaaggcctacgaccagcagctca |
| | | ID NO: 20 | aggccggagacaacccgtacctcaagtacaaccacgccgacgccgagttc |
| | | | caggagcggctcaaagaagatacgtcttttgggggcaacctcgggcgagc |
| | | | agtcttccaggccaaaaagaggcttcttgaacctcttggtctggttgagg |
| | | | aagcggctaagacggctcctggaaagaagaggcctgtagagcagtctcct |
| | | | caggaaccggactcctccgcgggtattggcaaatcgggtgcacagcccgc |
| | | | taaaaagagactcaatttcggtcagactggcgacacagagtcagtcccag |
| | | | accctcaaccaatcggagaacctcccgcagccccctcaggtgtgggatct |
| | | | cttacaatggcttcaggtggtggcgcaccagtggcagacaataacgaagg |
| | | | tgccgatggagtgggtagttcctcgggaaattggcattgcgattcccaat |
| | | | ggctgggggacagagtcatcaccaccagcacccgaacctgggccctgccc |
| | | | acctacaacaatcacctctacaagcaaatctccaacagcacatctggagg |
| | | | atcttcaaatgacaacgcctacttcggctacagcaccccctgggggtatt |
| | | | ttgacttcaacagattccactgccacttctcaccacgtgactggcagcga |
| | | | ctcatcaacaacaactggggattccggcctaagcgactcaacttcaagct |
| | | | cttcaacattcaggtcaaagaggttacggacaacaatggagtcaagacca |
| | | | tcgccaataaccttaccagcacggtccaggtcttcacggactcagactat |
| | | | cagctcccgtacgtgctcgggtcggctcacgagggctgcctcccgccgtt |
| | | | cccagcggacgttttcatgattcctcagtacgggtatctgacgcttaatg |
| | | | atggaagccaggccgtgggtcgttcgtccttttactgcctggaatatttc |
| | | | ccgtcgcaaatgctaagaacgggtaacaacttccagttcagctacgagtt |
| | | | tgagaacgtacctttccatagcagctacgctcacagccaaagcctggacc |
| | | | gactaatgaatccactcatcgaccaatacttgtactatctctcTaGAact |
| | | | attAACGGTTCTGGACAGAATCAAcaaacgctaaaattcagtgtggccgg |
| | | | acccagcaacatggctgtccagggaagaaactacatacctggacccagct |
| | | | accgacaacaacgtgtctcaaccactgtgactcaaaacaacaacagcgaa |
| | | | tttgcttggcctggagcttcttcttgggctctcaatggacgtaatagctt |
| | | | gatgaatcctggacctgctatggccagccacaaagaaggagaggaccgtt |
| | | | tctttcctttgtctggatctttaatttttggcaaacaaggTacCggCaga |
| | | | gacaacgtggatgcggacaaagtcatgataaccaacgaagaagaaattaa |
| | | | aactactaacccggtagcaacggagtcctatggacaagtggccacaaacc |
| | | | accagagtGCACAAAATGGGAAAGCGGACCCGAGGGCCCAAGCCCAGacc |
| | | | ggttgggttcaaaaccaaggaatacttccgggtatggtttggcaggacag |
| | | | agatgtgtacctgcaaggacccatttgggccaaaattcctcacacggacg |
| | | | gcaactttcacccttctccgctgatgggagggtttggaatgaagcacccg |
| | | | cctcctcagatcctcatcaaaaacacacctgtacctgcggatcctccaac |
| | | | ggccttcaacaaggacaagctgaactctttcatcacccagtattctactg |
| | | | gccaagtcagcgtggagatcgagtgggagctgcagaaggaaaacagcaag |
| | | | cgctggaacccggagatccagtacacttccaactattacaagtctaataa |
| | | | tgttgaatttgctgttaatactgaaggtgtatatagtgaaccccgcccca |
| | | | ttggcaccagatacctgactcgtaatctg |
| 220 | DNA | Adeno- | atggctgccgatggttatcttccagattggctcgaggacaaccttagtga |
| | | Associated | aggaattcgcgagtggtgggctttgaaacctggagcccctcaacccaagg |
| | | Virus 9 | caaatcaacaacatcaagacaacgctcgaggtcttgtgcttccgggttac |
| | | comprising | aaataccttggacccggcaacggactcgacaagggggagccggtcaacgc |
| | | SEQ | agcagacgcggcggccctcgagcacgacaaggcctacgaccagcagctca |
| | | ID NO: 20 | aggccggagacaacccgtacctcaagtacaaccacgccgacgccgagttc |
| | | | caggagcggctcaaagaagatacgtcttttgggggcaacctcgggcgagc |
| | | | agtcttccaggccaaaaagaggcttcttgaacctcttggtctggttgagg |
| | | | aagcggctaagacggctcctggaaagaagaggcctgtagagcagtctcct |
| | | | caggaaccggactcctccgcgggtattggcaaatcgggtgcacagcccgc |
| | | | taaaaagagactcaatttcggtcagactggcgacacagagtcagtcccag |
| | | | accctcaaccaatcggagaacctcccgcagccccctcaggtgtgggatct |
| | | | cttacaatggcttcaggtggtggcgcaccagtggcagacaataacgaagg |
| | | | tgccgatggagtgggtagttcctcgggaaattggcattgcgattcccaat |
| | | | ggctgggggacagagtcatcaccaccagcacccgaacctgggccctgccc |
| | | | acctacaacaatcacctctacaagcaaatctccaacagcacatctggagg |
| | | | atcttcaaatgacaacgcctacttcggctacagcaccccctgggggtatt |
| | | | ttgacttcaacagattccactgccacttctcaccacgtgactggcagcga |
| | | | ctcatcaacaacaactggggattccggcctaagcgactcaacttcaagct |
| | | | cttcaacattcaggtcaaagaggttacggacaacaatggagtcaagacca |
| | | | tcgccaataaccttaccagcacggtccaggtcttcacggactcagactat |
| | | | cagctcccgtacgtgctcgggtcggctcacgagggctgcctcccgccgtt |
| | | | cccagcggacgttttcatgattcctcagtacgggtatctgacgcttaatg |
| | | | atggaagccaggccgtgggtcgttcgtccttttactgcctggaatatttc |
| | | | ccgtcgcaaatgctaagaacgggtaacaacttccagttcagctacgagtt |
| | | | tgagaacgtacctttccatagcagctacgctcacagccaaagcctggacc |
| | | | gactaatgaatccactcatcgaccaatacttgtactatctctcTaGAact |
| | | | attAACGGTTCTGGACAGAATCAAcaaacgctaaaattcagtgtggccgg |
| | | | acccagcaacatggctgtccagggaagaaactacatacctggacccagct |
| | | | accgacaacaacgtgtctcaaccactgtgactcaaaacaacaacagcgaa |
| | | | tttgcttggcctggagcttcttcttgggctctcaatggacgtaatagctt |
| | | | gatgaatcctggacctgctatggccagccacaaagaaggagaggaccgtt |
| | | | tctttcctttgtctggatctttaatttttggcaaacaaggTacCggCaga |
| | | | gacaacgtggatgcggacaaagtcatgataaccaacgaagaagaaattaa |
| | | | aactactaacccggtagcaacggagtcctatggacaagtggccacaaacc |
| | | | accagagtGCTCAAAACGGGAAGGCCGATCCCCGCGCACAGGCCCAGacc |
| | | | ggttgggttcaaaaccaaggaatacttccgggtatggtttggcaggacag |
| | | | agatgtgtacctgcaaggacccatttgggccaaaattcctcacacggacg |
| | | | gcaactttcacccttctccgctgatgggagggtttggaatgaagcacccg |
| | | | cctcctcagatcctcatcaaaaacacacctgtacctgcggatcctccaac |
| | | | ggccttcaacaaggacaagctgaactctttcatcacccagtattctactg |
| | | | gccaagtcagcgtggagatcgagtgggagctgcagaaggaaaacagcaag |
| | | | cgctggaacccggagatccagtacacttccaactattacaagtctaataa |
| | | | tgttgaatttgctgttaatactgaaggtgtatatagtgaaccccgcccca |
| | | | ttggcaccagatacctgactcgtaatctg |
| 221 | DNA | Adeno- | atggctgccgatggttatcttccagattggctcgaggacaaccttagtga |
| | | Associated | aggaattcgcgagtggtgggctttgaaacctggagcccctcaacccaagg |
| | | Virus 9 | caaatcaacaacatcaagacaacgctcgaggtcttgtgcttccgggttac |
| | | comprising | aaataccttggacccggcaacggactcgacaagggggagccggtcaacgc |
| | | SEQ | agcagacgcggcggccctcgagcacgacaaggcctacgaccagcagctca |
| | | ID NO: 21 | aggccggagacaacccgtacctcaagtacaaccacgccgacgccgagttc |
| | | | caggagcggctcaaagaagatacgtcttttgggggcaacctcgggcgagc |
| | | | agtcttccaggccaaaaagaggcttcttgaacctcttggtctggttgagg |
| | | | aagcggctaagacggctcctggaaagaagaggcctgtagagcagtctcct |
| | | | caggaaccggactcctccgcgggtattggcaaatcgggtgcacagcccgc |
| | | | taaaaagagactcaatttcggtcagactggcgacacagagtcagtcccag |
| | | | accctcaaccaatcggagaacctcccgcagccccctcaggtgtgggatct |
| | | | cttacaatggcttcaggtggtggcgcaccagtggcagacaataacgaagg |
| | | | tgccgatggagtgggtagttcctcgggaaattggcattgcgattcccaat |
| | | | ggctgggggacagagtcatcaccaccagcacccgaacctgggccctgccc |
| | | | acctacaacaatcacctctacaagcaaatctccaacagcacatctggagg |
| | | | atcttcaaatgacaacgcctacttcggctacagcaccccctgggggtatt |
| | | | ttgacttcaacagattccactgccacttctcaccacgtgactggcagcga |
| | | | ctcatcaacaacaactggggattccggcctaagcgactcaacttcaagct |
| | | | cttcaacattcaggtcaaagaggttacggacaacaatggagtcaagacca |
| | | | tcgccaataaccttaccagcacggtccaggtcttcacggactcagactat |
| | | | cagctcccgtacgtgctcgggtcggctcacgagggctgcctcccgccgtt |
| | | | cccagcggacgttttcatgattcctcagtacgggtatctgacgcttaatg |
| | | | atggaagccaggccgtgggtcgttcgtccttttactgcctggaatatttc |
| | | | ccgtcgcaaatgctaagaacgggtaacaacttccagttcagctacgagtt |
| | | | tgagaacgtacctttccatagcagctacgctcacagccaaagcctggacc |
| | | | gactaatgaatccactcatcgaccaatacttgtactatctctcTaGAact |
| | | | attAACGGTTCTGGACAGAATCAAcaaacgctaaaattcagtgtggccgg |
| | | | acccagcaacatggctgtccagggaagaaactacatacctggacccagct |
| | | | accgacaacaacgtgtctcaaccactgtgactcaaaacaacaacagcgaa |
| | | | tttgcttggcctggagcttcttcttgggctctcaatggacgtaatagctt |
| | | | gatgaatcctggacctgctatggccagccacaaagaaggagaggaccgtt |
| | | | tctttcctttgtctggatctttaatttttggcaaacaaggTacCggCaga |
| | | | gacaacgtggatgcggacaaagtcatgataaccaacgaagaagaaattaa |
| | | | aactactaacccggtagcaacggagtcctatggacaagtggccacaaacc |
| | | | accagagtGCACAGCCCAGTTCAGGCGATCCCCGAGCCCAGGCACAGacc |
| | | | ggttgggttcaaaaccaaggaatacttccgggtatggtttggcaggacag |
| | | | agatgtgtacctgcaaggacccatttgggccaaaattcctcacacggacg |
| | | | gcaactttcacccttctccgctgatgggagggtttggaatgaagcacccg |
| | | | cctcctcagatcctcatcaaaaacacacctgtacctgcggatcctccaac |
| | | | ggccttcaacaaggacaagctgaactctttcatcacccagtattctactg |
| | | | gccaagtcagcgtggagatcgagtgggagctgcagaaggaaaacagcaag |
| | | | cgctggaacccggagatccagtacacttccaactattacaagtctaataa |
| | | | tgttgaatttgctgttaatactgaaggtgtatatagtgaaccccgcccca |
| | | | ttggcaccagatacctgactcgtaatctg |
| 222 | DNA | Adeno- | atggctgccgatggttatcttccagattggctcgaggacaaccttagtga |
| | | Associated | aggaattcgcgagtggtgggctttgaaacctggagcccctcaacccaagg |
| | | Virus 9 | caaatcaacaacatcaagacaacgctcgaggtcttgtgcttccgggttac |
| | | comprising | aaataccttggacccggcaacggactcgacaagggggagccggtcaacgc |
| | | SEQ | agcagacgcggcggccctcgagcacgacaaggcctacgaccagcagctca |
| | | ID NO: 21 | aggrcggagacaacccgtacctcaagtacaaccacgccgacgccgagttc |
| | | | caggagcggctcaaagaagatacgtcttttgggggcaacctcgggcgagc |
| | | | agtcttccaggccaaaaagaggcttcttgaacctcttggtctggttgagg |
| | | | aagcggctaagacggctcctggaaagaagaggcctgtagagcagtctcct |
| | | | caggaaccggactcctccgcgggtattggcaaatcgggtgcacagcccgc |
| | | | taaaaagagactcaatttcggtcagactggcgacacagagtcagtcccag |
| | | | accctcaaccaatcggagaacctcccgcagccccctaggtgtgggatctc |
| | | | ttacaatggcttcaggtggtggcgcaccagtggcagacaataacgaaggt |
| | | | gccgatggagtgggtagttcctcgggaaattggcattgcgattcccaatg |
| | | | gctgggggacagagtcatcaccaccagcacccgaacctgggccctgccca |
| | | | cctacaacaatcacctctacaagcaaatctccaacagcacatctggagga |
| | | | tcttcaaatgacaacgcctacttcggctacagcaccccctgggggtattt |
| | | | tgacttcaacagattccactgccacttctcaccacgtgactggcagcgac |
| | | | tcatcaacaacaactggggattccggcctaagcgactcaacttcaagctc |
| | | | ttcaacattcaggtcaaagaggttacggacaacaatggagtcaagaccat |
| | | | cgccaataaccttaccagcacggtccaggtcttcacggactcagactatc |
| | | | agctcccgtacgtgctcgggtcggctcacgagggctgcctcccgccgttc |
| | | | ccagcggacgttttcatgattcctcagtacgggtatctgacgcttaatga |
| | | | tggaagccaggccgtgggtcgttcgtccttttactgcctggaatatttcc |
| | | | cgtcgcaaatgctaagaacgggtaacaacttccagttcagctacgagttt |
| | | | gagaacgtacctttccatagcagctacgctcacagccaaagcctggaccg |
| | | | actaatgaatccactcatcgaccaatacttgtactatctctcTaGAacta |
| | | | ttAACGGTTCTGGACAGAATCAAcaaacgctaaaattcagtgtggccgga |
| | | | cccagcaacatggctgtccagggaagaaactacatacctggacccagcta |
| | | | ccgacaacaacgtgtctcaaccactgtgactcaaaacaacaacagcgaat |
| | | | ttgcttggcctggagcttcttcttgggctctcaatggacgtaatagcttg |
| | | | atgaatcctggacctgctatggccagccacaaagaaggagaggaccgttt |
| | | | ctttcctttgtctggatctttaatttttggcaaacaaggTacCggCagag |
| | | | acaacgtggatgcggacaaagtcatgataaccaacgaagaagaaattaaa |
| | | | actactaacccggtagcaacggagtcctatggacaagtggccacaaacca |
| | | | ccagagtGCGCAACCTTCCAGCGGAGACCCTCGTGCTCAGGCGCAAaccg |
| | | | gttgggttcaaaaccaaggaatacttccgggtatggtttggcaggacaga |
| | | | gatgtgtacctgcaaggacccatttgggccaaaattcctcacacggacgg |
| | | | caactttcacccttctccgctgatgggagggtttggaatgaagcacccgc |
| | | | ctcctcagatcctcatcaaaaacacacctgtacctgcggatcctccaacg |
| | | | gccttcaacaaggacaagctgaactctttcatcacccagtattctactgg |
| | | | ccaagtcagcgtggagatcgagtgggagctgcagaaggaaaacagcaagc |
| | | | gctggaacccggagatccagtacacttccaactattacaagtctaataat |
| | | | gttgaatttgctgttaatactgaaggtgtatatagtgaaccccgccccat |
| | | | tggcaccagatacctgactcgtaatctg |
| 223 | DNA | Adeno- | atggctgccgatggttatcttccagattggctcgaggacaaccttagtga |
| | | Associated | aggaattcgcgagtggtgggctttgaaacctggagcccctcaacccaagg |
| | | Virus 9 | caaatcaacaacatcaagacaacgctcgaggtcttgtgcttccgggttac |
| | | comprising | aaataccttggacccggcaacggactcgacaagggggagccggtcaacgc |
| | | SEQ | agcagacgcggcggccctcgagcacgacaaggcctacgaccagcagctca |
| | | ID NO: 21 | aggccggagacaacccgtacctcaagtacaaccacgccgacgccgagttc |
| | | | caggagcggctcaaagaagatacgtcttttgggggcaacctcgggcgagc |
| | | | agtcttccaggccaaaaagaggcttcttgaacctcttggtctggttgagg |
| | | | aagcggctaagacggctcctggaaagaagaggcctgtagagcagtctcct |
| | | | caggaaccggactcctccgcgggtattggcaaatcgggtgcacagcccgc |
| | | | taaaaagagactcaatttcggtcagactggcgacacagagtcagtcccag |
| | | | accctcaaccaatcggagaacctcccgcagccccctcaggtgtgggatct |
| | | | cttacaatggcttcaggtggtggcgcaccagtggcagacaataacgaagg |
| | | | tgccgatggagtgggtagttcctcgggaaattggcattgcgattcccaat |
| | | | ggctgggggacagagtcatcaccaccagcacccgaacctgggccctgccc |
| | | | acctacaacaatcacctctacaagcaaatctccaacagcacatctggagg |
| | | | atcttcaaatgacaacgcctacttcggctacagcaccccctgggggtatt |
| | | | ttgacttcaacagattccactgccacttctcaccacgtgactggcagcga |
| | | | ctcatcaacaacaactggggattccggcctaagcgactcaacttcaagct |
| | | | cttcaacattcaggtcaaagaggttacggacaacaatggagtcaagacca |
| | | | tcgccaataaccttaccagcacggtccaggtcttcacggactcagactat |
| | | | cagctcccgtacgtgctcgggtcggctcacgagggctgcctcccgccgtt |
| | | | cccagcggacgttttcatgattcctcagtacgggtatctgacgcttaatg |
| | | | atggaagccaggccgtgggtcgttcgtccttttactgcctggaatatttc |
| | | | ccgtcgcaaatgctaagaacgggtaacaacttccagttcagctacgagtt |
| | | | tgagaacgtacctttccatagcagctacgctcacagccaaagcctggacc |
| | | | gactaatgaatccactcatcgaccaatacttgtactatctctcTaGAact |
| | | | attAACGGTTCTGGACAGAATCAAcaaacgctaaaattcagtgtggccgg |
| | | | acccagcaacatggctgtccagggaagaaactacatacctggacccagct |
| | | | accgacaacaacgtgtctcaaccactgtgactcaaaacaacaacagcgaa |
| | | | tttgcttggcctggagcttcttcttgggctctcaatggacgtaatagctt |
| | | | gatgaatcctggacctgctatggccagccacaaagaaggagaggaccgtt |
| | | | tctttcctttgtctggatctttaatttttggcaaacaaggTacCggCaga |
| | | | gacaacgtggatgcggacaaagtcatgataaccaacgaagaagaaattaa |
| | | | aactactaacccggtagcaacggagtcctatggacaagtggccacaaacc |
| | | | accagagtGCTCAACCGTCGAGCGGTGATCCCCGTGCTCAAGCGCAAacc |
| | | | ggttgggttcaaaaccaaggaatacttccgggtatggtttggcaggacag |
| | | | agatgtgtacctgcaaggacccatttgggccaaaattcctcacacggacg |
| | | | gcaactttcacccttctccgctgatgggagggtttggaatgaagcacccg |
| | | | cctcctcagatcctcatcaaaaacacacctgtacctgcggatcctccaac |
| | | | ggccttcaacaaggacaagctgaactctttcatcacccagtattctactg |
| | | | gccaagtcagcgtggagatcgagtgggagctgcagaaggaaaacagcaag |
| | | | cgctggaacccggagatccagtacacttccaactattacaagtctaataa |
| | | | tgttgaatttgctgttaatactgaaggtgtatatagtgaaccccgcccca |
| | | | ttggcaccagatacctgactcgtaatctg |
| 224 | DNA | Adeno- | atggctgccgatggttatcttccagattggctcgaggacaaccttagtga |
| | | Associated | aggaattcgcgagtggtgggctttgaaacctggagcccctcaacccaagg |
| | | Virus 9 | caaatcaacaacatcaagacaacgctcgaggtcttgtgcttccgggttac |
| | | comprising | aaataccttggacccggcaacggactcgacaagggggagccggtcaacgc |
| | | SEQ | agcagacgcggcggccctcgagcacgacaaggcctacgaccagcagctca |
| | | ID NO: 21 | aggccggagacaacccgtacctcaagtacaaccacgccgacgccgagttc |
| | | | caggagcggctcaaagaagatacgtcttttgggggcaacctcgggcgagc |
| | | | agtcttccaggccaaaaagaggcttcttgaacctcttggtctggttgagg |
| | | | aagcggctaagacggctcctggaaagaagaggcctgtagagcagtctcct |
| | | | caggaaccggactcctccgcgggtattggcaaatcgggtgcacagcccgc |
| | | | taaaaagagactcaatttcggtcagactggcgacacagagtcagtcccag |
| | | | accctcaaccaatcggagaacctcccgcagccccctcaggtgtgggatct |
| | | | cttacaatggcttcaggtggtggcgcaccagtggcagacaataacgaagg |
| | | | tgccgatggagtgggtagttcctcgggaaattggcattgcgattcccaat |
| | | | ggctgggggacagagtcatcaccaccagcacccgaacctgggccctgccc |
| | | | acctacaacaatcacctctacaagcaaatctccaacagcacatctggagg |
| | | | atcttcaaatgacaacgcctacttcggctacagcaccccctgggggtatt |
| | | | ttgacttcaacagattccactgccacttctcaccacgtgactggcagcga |
| | | | ctcatcaacaacaactggggattccggcctaagcgactcaacttcaagct |
| | | | cttcaacattcaggtcaaagaggttacggacaacaatggagtcaagacca |
| | | | tcgccaataaccttaccagcacggtccaggtcttcacggactcagactat |
| | | | cagctcccgtacgtgctcgggtcggctcacgagggctgcctcccgccgtt |
| | | | cccagcggacgttttcatgattcctcagtacgggtatctgacgcttaatg |
| | | | atggaagccaggccgtgggtcgttcgtccttttactgcctggaatatttc |
| | | | ccgtcgcaaatgctaagaacgggtaacaacttccagttcagctacgagtt |
| | | | tgagaacgtacctttccatagcagctacgctcacagccaaagcctggacc |
| | | | gactaatgaatccactcatcgaccaatacttgtactatctctcTaGAact |
| | | | attAACGGTTCTGGACAGAATCAAcaaacgctaaaattcagtgtggccgg |
| | | | acccagcaacatggctgtccagggaagaaactacatacctggacccagct |
| | | | accgacaacaacgtgtctcaaccactgtgactcaaaacaacaacagcgaa |
| | | | tttgcttggcctggagcttcttcttgggctctcaatggacgtaatagctt |
| | | | gatgaatcctggacctgctatggccagccacaaagaaggagaggaccgtt |
| | | | tctttcctttgtctggatctttaatttttggcaaacaaggTacCggCaga |
| | | | gacaacgtggatgcggacaaagtcatgataaccaacgaagaagaaattaa |
| | | | aactactaacccggtagcaacggagtcctatggacaagtggccacaaacc |
| | | | accagagtGCTCAGCCATCATCCGGCGATCCCCGGGCGCAAGCACAGacc |
| | | | ggttgggttcaaaaccaaggaatacttccgggtatggtttggcaggacag |
| | | | agatgtgtacctgcaaggacccatttgggccaaaattcctcacacggacg |
| | | | gcaactttcacccttctccgctgatgggagggtttggaatgaagcacccg |
| | | | cctcctcagatcctcatcaaaaacacacctgtacctgcggatcctccaac |
| | | | ggccttcaacaaggacaagctgaactctttcatcacccagtattctactg |
| | | | gccaagtcagcgtggagatcgagtgggagctgcagaaggaaaacagcaag |
| | | | cgctggaacccggagatccagtacacttccaactattacaagtctaataa |
| | | | tgttgaatttgctgttaatactgaaggtgtatatagtgaaccccgcccca |
| | | | ttggcaccagatacctgactcgtaatctg |
| 225 | DNA | Adeno- | atggctgccgatggttatcttccagattggctcgaggacaaccttagtga |
| | | Associated | aggaattcgcgagtggtgggctttgaaacctggagcccctcaacccaagg |
| | | Virus 9 | caaatcaacaacatcaagacaacgctcgaggtcttgtgcttccgggttac |
| | | comprising | aaataccttggacccggcaacggactcgacaagggggagccggtcaacgc |
| | | SEQ | agcagacgcggcggccctcgagcacgacaaggcctacgaccagcagctca |
| | | ID NO: 21 | aggccggagacaacccgtacctcaagtacaaccacgccgacgccgagttc |
| | | | caggagcggctcaaagaagatacgtcttttgggggcaacctcgggcgagc |
| | | | agtcttccaggccaaaaagaggcttcttgaacctcttggtctggttgagg |
| | | | aagcggctaagacggctcctggaaagaagaggcctgtagagcagtctcct |
| | | | caggaaccggactcctccgcgggtattggcaaatcgggtgcacagcccgc |
| | | | taaaaagagactcaatttcggtcagactggcgacacagagtcagtcccag |
| | | | accctcaaccaatcggagaacctcccgcagccccctcaggtgtgggatct |
| | | | cttacaatggcttcaggtggtggcgcaccagtggcagacaataacgaagg |
| | | | tgccgatggagtgggtagttcctcgggaaattggcattgcgattcccaat |
| | | | ggctgggggacagagtcatcaccaccagcacccgaacctgggccctgccc |
| | | | acctacaacaatcacctctacaagcaaatctccaacagcacatctggagg |
| | | | atcttcaaatgacaacgcctacttcggctacagcaccccctgggggtatt |
| | | | ttgacttcaacagattccactgccacttctcaccacgtgactggcagcga |
| | | | ctcatcaacaacaactggggattccggcctaagcgactcaacttcaagct |
| | | | cttcaacattcaggtcaaagaggttacggacaacaatggagtcaagacca |
| | | | tcgccaataaccttaccagcacggtccaggtcttcacggactcagactat |
| | | | cagctcccgtacgtgctcgggtcggctcacgagggctgcctcccgccgtt |
| | | | cccagcggacgttttcatgattcctcagtacgggtatctgacgcttaatg |
| | | | atggaagccaggccgtgggtcgttcgtccttttactgcctggaatatttc |
| | | | ccgtcgcaaatgctaagaacgggtaacaacttccagttcagctacgagtt |
| | | | tgagaacgtacctttccatagcagctacgctcacagccaaagcctggacc |
| | | | gactaatgaatccactcatcgaccaatacttgtactatctctcTaGAact |
| | | | attAACGGTTCTGGACAGAATCAAcaaacgctaaaattcagtgtggccgg |
| | | | acccagcaacatggctgtccagggaagaaactacatacctggacccagct |
| | | | accgacaacaacgtgtctcaaccactgtgactcaaaacaacaacagcgaa |
| | | | tttgcttggcctggagcttcttcttgggctctcaatggacgtaatagctt |
| | | | gatgaatcctggacctgctatggccagccacaaagaaggagaggaccgtt |
| | | | tctttcctttgtctggatctttaatttttggcaaacaaggTacCggCaga |
| | | | gacaacgtggatgcggacaaagtcatgataaccaacgaagaagaaattaa |
| | | | aactactaacccggtagcaacggagtcctatggacaagtggccacaaacc |
| | | | accagagtGCACAGCCCTCGTCGGGGGATCCTAGAGCCCAAGCGCAGacc |
| | | | ggttgggttcaaaaccaaggaatacttccgggtatggtttggcaggacag |
| | | | agatgtgtacctgcaaggacccatttgggccaaaattcctcacacggacg |
| | | | gcaactttcacccttctccgctgatgggagggtttggaatgaagcacccg |
| | | | cctcctcagatcctcatcaaaaacacacctgtacctgcggatcctccaac |
| | | | ggccttcaacaaggacaagctgaactctttcatcacccagtattctactg |
| | | | gccaagtcagcgtggagatcgagtgggagctgcagaaggaaaacagcaag |
| | | | cgctggaacccggagatccagtacacttccaactattacaagtctaataa |
| | | | tgttgaatttgctgttaatactgaaggtgtatatagtgaaccccgcccca |
| | | | ttggcaccagatacctgactcgtaatctg |
| 226 | DNA | Adeno- | atggctgccgatggttatcttccagattggctcgaggacaaccttagtga |
| | | Associated | aggaattcgcgagtggtgggctttgaaacctggagcccctcaacccaagg |
| | | Virus 9 | caaatcaacaacatcaagacaacgctcgaggtcttgtgcttccgggttac |
| | | comprising | aaataccttggacccggcaacggactcgacaagggggagccggtcaacgc |
| | | SEQ | agcagacgcggcggccctcgagcacgacaaggcctacgaccagcagctca |
| | | ID NO: 21 | aggccggagacaacccgtacctcaagtacaaccacgccgacgccgagttc |
| | | | caggagcggctcaaagaagatacgtcttttgggggcaacctcgggcgagc |
| | | | agtcttccaggccaaaaagaggcttcttgaacctcttggtctggttgagg |
| | | | aagcggctaagacggctcctggaaagaagaggcctgtagagcagtctcct |
| | | | caggaaccggactcctccgcgggtattggcaaatcgggtgcacagcccgc |
| | | | taaaaagagactcaatttcggtcagactggcgacacagagtcagtcccag |
| | | | accctcaaccaatcggagaacctcccgcagccccctcaggtgtgggatct |
| | | | cttacaatggcttcaggtggtggcgcaccagtggcagacaataacgaagg |
| | | | tgccgatggagtgggtagttcctcgggaaattggcattgcgattcccaat |
| | | | ggctgggggacagagtcatcaccaccagcacccgaacctgggccctgccc |
| | | | acctacaacaatcacctctacaagcaaatctccaacagcacatctggagg |
| | | | atcttcaaatgacaacgcctacttcggctacagcaccccctgggggtatt |
| | | | ttgacttcaacagattccactgccacttctcaccacgtgactggcagcga |
| | | | ctcatcaacaacaactggggattccggcctaagcgactcaacttcaagct |
| | | | cttcaacattcaggtcaaagaggttacggacaacaatggagtcaagacca |
| | | | tcgccaataaccttaccagcacggtccaggtcttcacggactcagactat |
| | | | cagctcccgtacgtgctcgggtcggctcacgagggctgcctcccgccgtt |
| | | | cccagcggacgttttcatgattcctcagtacgggtatctgacgcttaatg |
| | | | atggaagccaggccgtgggtcgttcgtccttttactgcctggaatatttc |
| | | | ccgtcgcaaatgctaagaacgggtaacaacttccagttcagctacgagtt |
| | | | tgagaacgtacctttccatagcagctacgctcacagccaaagcctggacc |
| | | | gactaatgaatccactcatcgaccaatacttgtactatctctcTaGAact |
| | | | attAACGGTTCTGGACAGAATCAAcaaacgctaaaattcagtgtggccgg |
| | | | acccagcaacatggctgtccagggaagaaactacatacctggacccagct |
| | | | accgacaacaacgtgtctcaaccactgtgactcaaaacaacaacagcgaa |
| | | | tttgcttggcctggagcttcttcttgggctctcaatggacgtaatagctt |
| | | | gatgaatcctggacctgctatggccagccacaaagaaggagaggaccgtt |
| | | | tctttcctttgtctggatctttaatttttggcaaacaaggTacCggCaga |
| | | | gacaacgtggatgcggacaaagtcatgataaccaacgaagaagaaattaa |
| | | | aactactaacccggtagcaacggagtcctatggacaagtggccacaaacc |
| | | | accagagtGCCCAACCGAGCAGTGGAGACCCAAGGGCACAAGCGCAAacc |
| | | | ggttgggttcaaaaccaaggaatacttccgggtatggtttggcaggacag |
| | | | agatgtgtacctgcaaggacccatttgggccaaaattcctcacacggacg |
| | | | gcaactttcacccttctccgctgatgggagggtttggaatgaagcacccg |
| | | | cctcctcagatcctcatcaaaaacacacctgtacctgcggatcctccaac |
| | | | ggccttcaacaaggacaagctgaactctttcatcacccagtattctactg |
| | | | gccaagtcagcgtggagatcgagtgggagctgcagaaggaaaacagcaag |
| | | | cgctggaacccggagatccagtacacttccaactattacaagtctaataa |
| | | | tgttgaatttgctgttaatactgaaggtgtatatagtgaaccccgcccca |
| | | | ttggcaccagatacctgactcgtaatctg |
| 227 | DNA | Adeno- | atggctgccgatggttatcttccagattggctcgaggacaaccttagtga |
| | | Associated | aggaattcgcgagtggtgggctttgaaacctggagcccctcaacccaagg |
| | | Virus 9 | caaatcaacaacatcaagacaacgctcgaggtcttgtgcttccgggttac |
| | | comprising | aaataccttggacccggcaacggactcgacaagggggagccggtcaacgc |
| | | SEQ | agcagacgcggcggccctcgagcacgacaaggcctacgaccagcagctca |
| | | ID NO: 21 | aggrcggagacaacccgtacctcaagtacaaccacgccgacgccgagttc |
| | | | caggagcggctcaaagaagatacgtcttttgggggcaacctcgggcgagc |
| | | | agtcttccaggccaaaaagaggcttcttgaacctcttggtctggttgagg |
| | | | aagcggctaagacggctcctggaaagaagaggcctgtagagcagtctcct |
| | | | caggaaccggactcctccgcgggtattggcaaatcgggtgcacagcccgc |
| | | | taaaaagagactcaatttcggtcagactggcgacacagagtcagtcccag |
| | | | accctcaaccaatcggagaacctcccgcagccccctcaggtgtgggatct |
| | | | cttacaatggcttcaggtggtggcgcaccagtggcagacaataacgaagg |
| | | | tgccgatggagtgggtagttcctcgggaaattggcattgcgattcccaat |
| | | | ggctgggggacagagtcatcaccaccagcacccgaacctgggccctgccc |
| | | | acctacaacaatcacctctacaagcaaatctccaacagcacatctggagg |
| | | | atcttcaaatgacaacgcctacttcggctacagcaccccctgggggtatt |
| | | | ttgacttcaacagattccactgccacttctcaccacgtgactggcagcga |
| | | | ctcatcaacaacaactggggattccggcctaagcgactcaacttcaagct |
| | | | cttcaacattcaggtcaaagaggttacggacaacaatggagtcaagacca |
| | | | tcgccaataaccttaccagcacggtccaggtcttcacggactcagactat |
| | | | cagctcccgtacgtgctcgggtcggctcacgagggctgcctcccgccgtt |
| | | | cccagcggacgttttcatgattcctcagtacgggtatctgacgcttaatg |
| | | | atggaagccaggccgtgggtcgttcgtccttttactgcctggaatatttc |
| | | | ccgtcgcaaatgctaagaacgggtaacaacttccagttcagctacgagtt |
| | | | tgagaacgtacctttccatagcagctacgctcacagccaaagcctggacc |
| | | | gactaatgaatccactcatcgaccaatacttgtactatctctcTaGAact |
| | | | attAACGGTTCTGGACAGAATCAAcaaacgctaaaattcagtgtggccgg |
| | | | acccagcaacatggctgtccagggaagaaactacatacctggacccagct |
| | | | accgacaacaacgtgtctcaaccactgtgactcaaaacaacaacagcgaa |
| | | | tttgcttggcctggagcttcttcttgggctctcaatggacgtaatagctt |
| | | | gatgaatcctggacctgctatggccagccacaaagaaggagaggaccgtt |
| | | | tctttcctttgtctggatctttaatttttggcaaacaaggTacCggCaga |
| | | | gacaacgtggatgcggacaaagtcatgataaccaacgaagaagaaattaa |
| | | | aactactaacccggtagcaacggagtcctatggacaagtggccacaaacc |
| | | | accagagtGCACAACCCAGCTCTGGGGATCCCAGGGCCCAGGCTCAGacc |
| | | | ggttgggttcaaaaccaaggaatacttccgggtatggtttggcaggacag |
| | | | agatgtgtacctgcaaggacccatttgggccaaaattcctcacacggacg |
| | | | gcaactttcacccttctccgctgatgggagggtttggaatgaagcacccg |
| | | | cctcctcagatcctcatcaaaaacacacctgtacctgcggatcctccaac |
| | | | ggccttcaacaaggacaagctgaactctttcatcacccagtattctactg |
| | | | gccaagtcagcgtggagatcgagtgggagctgcagaaggaaaacagcaag |
| | | | cgctggaacccggagatccagtacacttccaactattacaagtctaataa |
| | | | tgttgaatttgctgttaatactgaaggtgtatatagtgaaccccgcccca |
| | | | ttggcaccagatacctgactcgtaatctg |
| 228 | DNA | Adeno- | atggctgccgatggttatcttccagattggctcgaggacaaccttagtga |
| | | Associated | aggaattcgcgagtggtgggctttgaaacctggagcccctcaacccaagg |
| | | Virus 9 | caaatcaacaacatcaagacaacgctcgaggtcttgtgcttccgggttac |
| | | comprising | aaataccttggacccggcaacggactcgacaagggggagccggtcaacgc |
| | | SEQ | agcagacgcggcggccctcgagcacgacaaggcctacgaccagcagctca |
| | | ID NO: 21 | aggccggagacaacccgtacctcaagtacaaccacgccgacgccgagttc |
| | | | caggagcggctcaaagaagatacgtcttttgggggcaacctcgggcgagc |
| | | | agtcttccaggccaaaaagaggcttcttgaacctcttggtctggttgagg |
| | | | aagcggctaagacggctcctggaaagaagaggcctgtagagcagtctcct |
| | | | caggaaccggactcctccgcgggtattggcaaatcgggtgcacagcccgc |
| | | | taaaaagagactcaatttcggtcagactggcgacacagagtcagtcccag |
| | | | accctcaaccaatcggagaacctcccgcagccccctcaggtgtgggatct |
| | | | cttacaatggcttcaggtggtggcgcaccagtggcagacaataacgaagg |
| | | | tgccgatggagtgggtagttcctcgggaaattggcattgcgattcccaat |
| | | | ggctgggggacagagtcatcaccaccagcacccgaacctgggccctgccc |
| | | | acctacaacaatcacctctacaagcaaatctccaacagcacatctggagg |
| | | | atcttcaaatgacaacgcctacttcggctacagcaccccctgggggtatt |
| | | | ttgacttcaacagattccactgccacttctcaccacgtgactggcagcga |
| | | | ctcatcaacaacaactggggattccggcctaagcgactcaacttcaagct |
| | | | cttcaacattcaggtcaaagaggttacggacaacaatggagtcaagacca |
| | | | tcgccaataaccttaccagcacggtccaggtcttcacggactcagactat |
| | | | cagctcccgtacgtgctcgggtcggctcacgagggctgcctcccgccgtt |
| | | | cccagcggacgttttcatgattcctcagtacgggtatctgacgcttaatg |
| | | | atggaagccaggccgtgggtcgttcgtccttttactgcctggaatatttc |
| | | | ccgtcgcaaatgctaagaacgggtaacaacttccagttcagctacgagtt |
| | | | tgagaacgtacctttccatagcagctacgctcacagccaaagcctggacc |
| | | | gactaatgaatccactcatcgaccaatacttgtactatctctcTaGAact |
| | | | attAACGGTTCTGGACAGAATCAAcaaacgctaaaattcagtgtggccgg |
| | | | acccagcaacatggctgtccagggaagaaactacatacctggacccagct |
| | | | accgacaacaacgtgtctcaaccactgtgactcaaaacaacaacagcgaa |
| | | | tttgcttggcctggagcttcttcttgggctctcaatggacgtaatagctt |
| | | | gatgaatcctggacctgctatggccagccacaaagaaggagaggaccgtt |
| | | | tctttcctttgtctggatctttaatttttggcaaacaaggTacCggCaga |
| | | | gacaacgtggatgcggacaaagtcatgataaccaacgaagaagaaattaa |
| | | | aactactaacccggtagcaacggagtcctatggacaagtggccacaaacc |
| | | | accagagtGCCCAGCCATCCAGTGGCGACCCACGCGCCCAGGCCCAGacc |
| | | | ggttgggttcaaaaccaaggaatacttccgggtatggtttggcaggacag |
| | | | agatgtgtacctgcaaggacccatttgggccaaaattcctcacacggacg |
| | | | gcaactttcacccttctccgctgatgggagggtttggaatgaagcacccg |
| | | | cctcctcagatcctcatcaaaaacacacctgtacctgcggatcctccaac |
| | | | ggccttcaacaaggacaagctgaactctttcatcacccagtattctactg |
| | | | gccaagtcagcgtggagatcgagtgggagctgcagaaggaaaacagcaag |
| | | | cgctggaacccggagatccagtacacttccaactattacaagtctaataa |
| | | | tgttgaatttgctgttaatactgaaggtgtatatagtgaaccccgcccca |
| | | | ttggcaccagatacctgactcgtaatctg |
| 229 | DNA | Adeno- | atggctgccgatggttatcttccagattggctcgaggacaaccttagtga |
| | | Associated | aggaattcgcgagtggtgggctttgaaacctggagcccctcaacccaagg |
| | | Virus 9 | caaatcaacaacatcaagacaacgctcgaggtcttgtgcttccgggttac |
| | | comprising | aaataccttggacccggcaacggactcgacaagggggagccggtcaacgc |
| | | SEQ | agcagacgcggcggccctcgagcacgacaaggcctacgaccagcagctca |
| | | ID NO: 21 | aggccggagacaacccgtacctcaagtacaaccacgccgacgccgagttc |
| | | | caggagcggctcaaagaagatacgtcttttgggggcaacctcgggcgagc |
| | | | agtcttccaggccaaaaagaggcttcttgaacctcttggtctggttgagg |
| | | | aagcggctaagacggctcctggaaagaagaggcctgtagagcagtctcct |
| | | | caggaaccggactcctccgcgggtattggcaaatcgggtgcacagcccgc |
| | | | taaaaagagactcaatttcggtcagactggcgacacagagtcagtcccag |
| | | | accctcaaccaatcggagaacctcccgcagccccctcaggtgtgggatct |
| | | | cttacaatggcttcaggtggtggcgcaccagtggcagacaataacgaagg |
| | | | tgccgatggagtgggtagttcctcgggaaattggcattgcgattcccaat |
| | | | ggctgggggacagagtcatcaccaccagcacccgaacctgggccctgccc |
| | | | acctacaacaatcacctctacaagcaaatctccaacagcacatctggagg |
| | | | atcttcaaatgacaacgcctacttcggctacagcaccccctgggggtatt |
| | | | ttgacttcaacagattccactgccacttctcaccacgtgactggcagcga |
| | | | ctcatcaacaacaactggggattccggcctaagcgactcaacttcaagct |
| | | | cttcaacattcaggtcaaagaggttacggacaacaatggagtcaagacca |
| | | | tcgccaataaccttaccagcacggtccaggtcttcacggactcagactat |
| | | | cagctcccgtacgtgctcgggtcggctcacgagggctgcctcccgccgtt |
| | | | cccagcggacgttttcatgattcctcagtacgggtatctgacgcttaatg |
| | | | atggaagccaggccgtgggtcgttcgtccttttactgcctggaatatttc |
| | | | ccgtcgcaaatgctaagaacgggtaacaacttccagttcagctacgagtt |
| | | | tgagaacgtacctttccatagcagctacgctcacagccaaagcctggacc |
| | | | gactaatgaatccactcatcgaccaatacttgtactatctctcTaGAact |
| | | | attAACGGTTCTGGACAGAATCAAcaaacgctaaaattcagtgtggccgg |
| | | | acccagcaacatggctgtccagggaagaaactacatacctggacccagct |
| | | | accgacaacaacgtgtctcaaccactgtgactcaaaacaacaacagcgaa |
| | | | tttgcttggcctggagcttcttcttgggctctcaatggacgtaatagctt |
| | | | gatgaatcctggacctgctatggccagccacaaagaaggagaggaccgtt |
| | | | tctttcctttgtctggatctttaatttttggcaaacaaggTacCggCaga |
| | | | gacaacgtggatgcggacaaagtcatgataaccaacgaagaagaaattaa |
| | | | aactactaacccggtagcaacggagtcctatggacaagtggccacaaacc |
| | | | accagagtGCGCAGCCGTCAAGCGGCGACCCGCGGGCTCAAGCGCAAacc |
| | | | ggttgggttcaaaaccaaggaatacttccgggtatggtttggcaggacag |
| | | | agatgtgtacctgcaaggacccatttgggccaaaattcctcacacggacg |
| | | | gcaactttcacccttctccgctgatgggagggtttggaatgaagcacccg |
| | | | cctcctcagatcctcatcaaaaacacacctgtacctgcggatcctccaac |
| | | | ggccttcaacaaggacaagctgaactctttcatcacccagtattctactg |
| | | | gccaagtcagcgtggagatcgagtgggagctgcagaaggaaaacagcaag |
| | | | cgctggaacccggagatccagtacacttccaactattacaagtctaataa |
| | | | tgttgaatttgctgttaatactgaaggtgtatatagtgaaccccgcccca |
| | | | ttggcaccagatacctgactcgtaatctg |
| 230 | DNA | Adeno- | atggctgccgatggttatcttccagattggctcgaggacaaccttagtga |
| | | Associated | aggaattcgcgagtggtgggctttgaaacctggagcccctcaacccaagg |
| | | Virus 9 | caaatcaacaacatcaagacaacgctcgaggtcttgtgcttccgggttac |
| | | comprising | aaataccttggacccggcaacggactcgacaagggggagccggtcaacgc |
| | | SEQ | agcagacgcggcggccctcgagcacgacaaggcctacgaccagcagctca |
| | | ID NO: 21 | aggccggagacaacccgtacctcaagtacaaccacgccgacgccgagttc |
| | | | caggagcggctcaaagaagatacgtcttttgggggcaacctcgggcgagc |
| | | | agtcttccaggccaaaaagaggcttcttgaacctcttggtctggttgagg |
| | | | aagcggctaagacggctcctggaaagaagaggcctgtagagcagtctcct |
| | | | caggaaccggactcctccgcgggtattggcaaatcgggtgcacagcccgc |
| | | | taaaaagagactcaatttcggtcagactggcgacacagagtcagtcccag |
| | | | accctcaaccaatcggagaacctcccgcagccccctcaggtgtgggatct |
| | | | cttacaatggcttcaggtggtggcgcaccagtggcagacaataacgaagg |
| | | | tgccgatggagtgggtagttcctcgggaaattggcattgcgattcccaat |
| | | | ggctgggggacagagtcatcaccaccagcacccgaacctgggccctgccc |
| | | | acctacaacaatcacctctacaagcaaatctccaacagcacatctggagg |
| | | | atcttcaaatgacaacgcctacttcggctacagcaccccctgggggtatt |
| | | | ttgacttcaacagattccactgccacttctcaccacgtgactggcagcga |
| | | | ctcatcaacaacaactggggattccggcctaagcgactcaacttcaagct |
| | | | cttcaacattcaggtcaaagaggttacggacaacaatggagtcaagacca |
| | | | tcgccaataaccttaccagcacggtccaggtcttcacggactcagactat |
| | | | cagctcccgtacgtgctcgggtcggctcacgagggctgcctcccgccgtt |
| | | | cccagcggacgttttcatgattcctcagtacgggtatctgacgcttaatg |
| | | | atggaagccaggccgtgggtcgttcgtccttttactgcctggaatatttc |
| | | | ccgtcgcaaatgctaagaacgggtaacaacttccagttcagctacgagtt |
| | | | tgagaacgtacctttccatagcagctacgctcacagccaaagcctggacc |
| | | | gactaatgaatccactcatcgaccaatacttgtactatctctcTaGAact |
| | | | attAACGGTTCTGGACAGAATCAAcaaacgctaaaattcagtgtggccgg |
| | | | acccagcaacatggctgtccagggaagaaactacatacctggacccagct |
| | | | accgacaacaacgtgtctcaaccactgtgactcaaaacaacaacagcgaa |
| | | | tttgcttggcctggagcttcttcttgggctctcaatggacgtaatagctt |
| | | | gatgaatcctggacctgctatggccagccacaaagaaggagaggaccgtt |
| | | | tctttcctttgtctggatctttaatttttggcaaacaaggTacCggCaga |
| | | | gacaacgtggatgcggacaaagtcatgataaccaacgaagaagaaattaa |
| | | | aactactaacccggtagcaacggagtcctatggacaagtggccacaaacc |
| | | | accagagtGCGCAACCAAGTAGCGGTGACCCGCGCGCTCAGGCACAAacc |
| | | | ggttgggttcaaaaccaaggaatacttccgggtatggtttggcaggacag |
| | | | agatgtgtacctgcaaggacccatttgggccaaaattcctcacacggacg |
| | | | gcaactttcacccttctccgctgatgggagggtttggaatgaagcacccg |
| | | | cctcctcagatcctcatcaaaaacacacctgtacctgcggatcctccaac |
| | | | ggccttcaacaaggacaagctgaactctttcatcacccagtattctactg |
| | | | gccaagtcagcgtggagatcgagtgggagctgcagaaggaaaacagcaag |
| | | | cgctggaacccggagatccagtacacttccaactattacaagtctaataa |
| | | | tgttgaatttgctgttaatactgaaggtgtatatagtgaaccccgcccca |
| | | | ttggcaccagatacctgactcgtaatctg |
| 231 | DNA | Adeno- | atggctgccgatggttatcttccagattggctcgaggacaaccttagtga |
| | | Associated | aggaattcgcgagtggtgggctttgaaacctggagcccctcaacccaagg |
| | | Virus 9 | caaatcaacaacatcaagacaacgctcgaggtcttgtgcttccgggttac |
| | | comprising | aaataccttggacccggcaacggactcgacaagggggagccggtcaacgc |
| | | SEQ | agcagacgcggcggccctcgagcacgacaaggcctacgaccagcagctca |
| | | ID NO: 22 | aggccggagacaacccgtacctcaagtacaaccacgccgacgccgagttc |
| | | | caggagcggctcaaagaagatacgtcttttgggggcaacctcgggcgagc |
| | | | agtcttccaggccaaaaagaggcttcttgaacctcttggtctggttgagg |
| | | | aagcggctaagacggctcctggaaagaagaggcctgtagagcagtctcct |
| | | | caggaaccggactcctccgcgggtattggcaaatcgggtgcacagcccgc |
| | | | taaaaagagactcaatttcggtcagactggcgacacagagtcagtcccag |
| | | | accctcaaccaatcggagaacctcccgcagccccctcaggtgtgggatct |
| | | | cttacaatggcttcaggtggtggcgcaccagtggcagacaataacgaagg |
| | | | tgccgatggagtgggtagttcctcgggaaattggcattgcgattcccaat |
| | | | ggctgggggacagagtcatcaccaccagcacccgaacctgggccctgccc |
| | | | acctacaacaatcacctctacaagcaaatctccaacagcacatctggagg |
| | | | atcttcaaatgacaacgcctacttcggctacagcaccccctgggggtatt |
| | | | ttgacttcaacagattccactgccacttctcaccacgtgactggcagcga |
| | | | ctcatcaacaacaactggggattccggcctaagcgactcaacttcaagct |
| | | | cttcaacattcaggtcaaagaggttacggacaacaatggagtcaagacca |
| | | | tcgccaataaccttaccagcacggtccaggtcttcacggactcagactat |
| | | | cagctcccgtacgtgctcgggtcggctcacgagggctgcctcccgccgtt |
| | | | cccagcggacgttttcatgattcctcagtacgggtatctgacgcttaatg |
| | | | atggaagccaggccgtgggtcgttcgtccttttactgcctggaatatttc |
| | | | ccgtcgcaaatgctaagaacgggtaacaacttccagttcagctacgagtt |
| | | | tgagaacgtacctttccatagcagctacgctcacagccaaagcctggacc |
| | | | gactaatgaatccactcatcgaccaatacttgtactatctctcTaGAact |
| | | | attAACGGTTCTGGACAGAATCAAcaaacgctaaaattcagtgtggccgg |
| | | | acccagcaacatggctgtccagggaagaaactacatacctggacccagct |
| | | | accgacaacaacgtgtctcaaccactgtgactcaaaacaacaacagcgaa |
| | | | tttgcttggcctggagcttcttcttgggctctcaatggacgtaatagctt |
| | | | gatgaatcctggacctgctatggccagccacaaagaaggagaggaccgtt |
| | | | tctttcctttgtctggatctttaatttttggcaaacaaggTacCggCaga |
| | | | gacaacgtggatgcggacaaagtcatgataaccaacgaagaagaaattaa |
| | | | aactactaacccggtagcaacggagtcctatggacaagtggccacaaacc |
| | | | accagagtGCCCAGCAATCACGTGACTTGTATAGGGCTCAGGCCCAGacc |
| | | | ggttgggttcaaaaccaaggaatacttccgggtatggtttggcaggacag |
| | | | agatgtgtacctgcaaggacccatttgggccaaaattcctcacacggacg |
| | | | gcaactttcacccttctccgctgatgggagggtttggaatgaagcacccg |
| | | | cctcctcagatcctcatcaaaaacacacctgtacctgcggatcctccaac |
| | | | ggccttcaacaaggacaagctgaactctttcatcacccagtattctactg |
| | | | gccaagtcagcgtggagatcgagtgggagctgcagaaggaaaacagcaag |
| | | | cgctggaacccggagatccagtacacttccaactattacaagtctaataa |
| | | | tgttgaatttgctgttaatactgaaggtgtatatagtgaaccccgcccca |
| | | | ttggcaccagatacctgactcgtaatctg |
| 232 | DNA | Adeno- | atggctgccgatggttatcttccagattggctcgaggacaaccttagtga |
| | | Associated | aggaattcgcgagtggtgggctttgaaacctggagcccctcaacccaagg |
| | | Virus 9 | caaatcaacaacatcaagacaacgctcgaggtcttgtgcttccgggttac |
| | | comprising | aaataccttggacccggcaacggactcgacaagggggagccggtcaacgc |
| | | SEQ | agcagacgcggcggccctcgagcacgacaaggcctacgaccagcagctca |
| | | ID NO: 22 | aggccggagacaacccgtacctcaagtacaaccacgccgacgccgagttc |
| | | | caggagcggctcaaagaagatacgtcttttgggggcaacctcgggcgagc |
| | | | agtcttccaggccaaaaagaggcttcttgaacctcttggtctggttgagg |
| | | | aagcggctaagacggctcctggaaagaagaggcctgtagagcagtctcct |
| | | | caggaaccggactcctccgcgggtattggcaaatcgggtgcacagcccgc |
| | | | taaaaagagactcaatttcggtcagactggcgacacagagtcagtcccag |
| | | | accctcaaccaatcggagaacctcccgcagccccctcaggtgtgggatct |
| | | | cttacaatggcttcaggtggtggcgcaccagtggcagacaataacgaagg |
| | | | tgccgatggagtgggtagttcctcgggaaattggcattgcgattcccaat |
| | | | ggctgggggacagagtcatcaccaccagcacccgaacctgggccctgccc |
| | | | acctacaacaatcacctctacaagcaaatctccaacagcacatctggagg |
| | | | atcttcaaatgacaacgcctacttcggctacagcaccccctgggggtatt |
| | | | ttgacttcaacagattccactgccacttctcaccacgtgactggcagcga |
| | | | ctcatcaacaacaactggggattccggcctaagcgactcaacttcaagct |
| | | | cttcaacattcaggtcaaagaggttacggacaacaatggagtcaagacca |
| | | | tcgccaataaccttaccagcacggtccaggtcttcacggactcagactat |
| | | | cagctcccgtacgtgctcgggtcggctcacgagggctgcctcccgccgtt |
| | | | cccagcggacgttttcatgattcctcagtacgggtatctgacgcttaatg |
| | | | atggaagccaggccgtgggtcgttcgtccttttactgcctggaatatttc |
| | | | ccgtcgcaaatgctaagaacgggtaacaacttccagttcagctacgagtt |
| | | | tgagaacgtacctttccatagcagctacgctcacagccaaagcctggacc |
| | | | gactaatgaatccactcatcgaccaatacttgtactatctctcTaGAact |
| | | | attAACGGTTCTGGACAGAATCAAcaaacgctaaaattcagtgtggccgg |
| | | | acccagcaacatggctgtccagggaagaaactacatacctggacccagct |
| | | | accgacaacaacgtgtctcaaccactgtgactcaaaacaacaacagcgaa |
| | | | tttgcttggcctggagcttcttcttgggctctcaatggacgtaatagctt |
| | | | gatgaatcctggacctgctatggccagccacaaagaaggagaggaccgtt |
| | | | tctttcctttgtctggatctttaatttttggcaaacaaggTacCggCaga |
| | | | gacaacgtggatgcggacaaagtcatgataaccaacgaagaagaaattaa |
| | | | aactactaacccggtagcaacggagtcctatggacaagtggccacaaacc |
| | | | accagagtGCGCAGCAGTCTAGGGACTTGTACCGTGCTCAAGCTCAAacc |
| | | | ggttgggttcaaaaccaaggaatacttccgggtatggtttggcaggacag |
| | | | agatgtgtacctgcaaggacccatttgggccaaaattcctcacacggacg |
| | | | gcaactttcacccttctccgctgatgggagggtttggaatgaagcacccg |
| | | | cctcctcagatcctcatcaaaaacacacctgtacctgcggatcctccaac |
| | | | ggccttcaacaaggacaagctgaactctttcatcacccagtattctactg |
| | | | gccaagtcagcgtggagatcgagtgggagctgcagaaggaaaacagcaag |
| | | | cgctggaacccggagatccagtacacttccaactattacaagtctaataa |
| | | | tgttgaatttgctgttaatactgaaggtgtatatagtgaaccccgcccca |
| | | | ttggcaccagatacctgactcgtaatctg |
| 233 | DNA | Adeno- | atggctgccgatggttatcttccagattggctcgaggacaaccttagtga |
| | | Associated | aggaattcgcgagtggtgggctttgaaacctggagcccctcaacccaagg |
| | | Virus 9 | caaatcaacaacatcaagacaacgctcgaggtcttgtgcttccgggttac |
| | | comprising | aaataccttggacccggcaacggactcgacaagggggagccggtcaacgc |
| | | SEQ | agcagacgcggcggccctcgagcacgacaaggcctacgaccagcagctca |
| | | ID NO: 22 | aggccggagacaacccgtacctcaagtacaaccacgccgacgccgagttc |
| | | | caggagcggctcaaagaagatacgtcttttgggggcaacctcgggcgagc |
| | | | agtcttccaggccaaaaagaggcttcttgaacctcttggtctggttgagg |
| | | | aagcggctaagacggctcctggaaagaagaggcctgtagagcagtctcct |
| | | | caggaaccggactcctccgcgggtattggcaaatcgggtgcacagcccgc |
| | | | taaaaagagactcaatttcggtcagactggcgacacagagtcagtcccag |
| | | | accctcaaccaatcggagaacctcccgcagccccctcaggtgtgggatct |
| | | | cttacaatggcttcaggtggtgggcaccagtggcagacaataacgaaggt |
| | | | gccgatggagtgggtagttcctcgggaaattggcattgcgattcccaatg |
| | | | gctgggggacagagtcatcaccaccagcacccgaacctgggccctgccca |
| | | | cctacaacaatcacctctacaagcaaatctccaacagcacatctggagga |
| | | | tcttcaaatgacaacgcctacttcggctacagcaccccctgggggtattt |
| | | | tgacttcaacagattccactgccacttctcaccacgtgactggcagcgac |
| | | | tcatcaacaacaactggggattccggcctaagcgactcaacttcaagctc |
| | | | ttcaacattcaggtcaaagaggttacggacaacaatggagtcaagaccat |
| | | | cgccaataaccttaccagcacggtccaggtcttcacggactcagactatc |
| | | | agctcccgtacgtgctcgggtcggctcacgagggctgcctcccgccgttc |
| | | | ccagcggacgttttcatgattcctcagtacgggtatctgacgcttaatga |
| | | | tggaagccaggccgtgggtcgttcgtccttttactgcctggaatatttcc |
| | | | cgtcgcaaatgctaagaacgggtaacaacttccagttcagctacgagttt |
| | | | gagaacgtacctttccatagcagctacgctcacagccaaagcctggaccg |
| | | | actaatgaatccactcatcgaccaatacttgtactatctctcTaGAacta |
| | | | ttAACGGTTCTGGACAGAATCAAcaaacgctaaaattcagtgtggccgga |
| | | | cccagcaacatggctgtccagggaagaaactacatacctggacccagcta |
| | | | ccgacaacaacgtgtctcaaccactgtgactcaaaacaacaacagcgaat |
| | | | ttgcttggcctggagcttcttcttgggctctcaatggacgtaatagcttg |
| | | | atgaatcctggacctgctatggccagccacaaagaaggagaggaccgttt |
| | | | ctttcctttgtctggatctttaatttttggcaaacaaggTacCggCagag |
| | | | acaacgtggatgcggacaaagtcatgataaccaacgaagaagaaattaaa |
| | | | actactaacccggtagcaacggagtcctatggacaagtggccacaaacca |
| | | | ccagagtGCTCAGCAATCAAGGGACTTGTATAGGGCGCAGGCCCAAaccg |
| | | | gttgggttcaaaaccaaggaatacttccgggtatggtttggcaggacaga |
| | | | gatgtgtacctgcaaggacccatttgggccaaaattcctcacacggacgg |
| | | | caactttcacccttctccgctgatgggagggtttggaatgaagcacccgc |
| | | | ctcctcagatcctcatcaaaaacacacctgtacctgcggatcctccaacg |
| | | | gccttcaacaaggacaagctgaactctttcatcacccagtattctactgg |
| | | | ccaagtcagcgtggagatcgagtgggagctgcagaaggaaaacagcaagc |
| | | | gctggaacccggagatccagtacacttccaactattacaagtctaataat |
| | | | gttgaatttgctgttaatactgaaggtgtatatagtgaaccccgccccat |
| | | | tggcaccagatacctgactcgtaatctg |
| 234 | DNA | Adeno- | atggctgccgatggttatcttccagattggctcgaggacaaccttagtga |
| | | Associated | aggaattcgcgagtggtgggctttgaaacctggagcccctcaacccaagg |
| | | Virus 9 | caaatcaacaacatcaagacaacgctcgaggtcttgtgcttccgggttac |
| | | comprising | aaataccttggacccggcaacggactcgacaagggggagccggtcaacgc |
| | | SEQ | agcagacgcggcggccctcgagcacgacaaggcctacgaccagcagctca |
| | | ID NO: 22 | aggccggagacaacccgtacctcaagtacaaccacgccgacgccgagttc |
| | | | caggagcggctcaaagaagatacgtcttttgggggcaacctcgggcgagc |
| | | | agtcttccaggccaaaaagaggcttcttgaacctcttggtctggttgagg |
| | | | aagcggctaagacggctcctggaaagaagaggcctgtagagcagtctcct |
| | | | caggaaccggactcctccgcgggtattggcaaatcgggtgcacagcccgc |
| | | | taaaaagagactcaatttcggtcagactggcgacacagagtcagtcccag |
| | | | accctcaaccaatcggagaacctcccgcagccccctcaggtgtgggatct |
| | | | cttacaatggcttcaggtggtggcgcaccagtggcagacaataacgaagg |
| | | | tgccgatggagtgggtagttcctcgggaaattggcattgcgattcccaat |
| | | | ggctgggggacagagtcatcaccaccagcacccgaacctgggccctgccc |
| | | | acctacaacaatcacctctacaagcaaatctccaacagcacatctggagg |
| | | | atcttcaaatgacaacgcctacttcggctacagcaccccctgggggtatt |
| | | | ttgacttcaacagattccactgccacttctcaccacgtgactggcagcga |
| | | | ctcatcaacaacaactggggattccggcctaagcgactcaacttcaagct |
| | | | cttcaacattcaggtcaaagaggttacggacaacaatggagtcaagacca |
| | | | tcgccaataaccttaccagcacggtccaggtcttcacggactcagactat |
| | | | cagctcccgtacgtgctcgggtcggctcacgagggctgcctcccgccgtt |
| | | | cccagcggacgttttcatgattctcagtacgggtatctgacgcttaatga |
| | | | tggaagccaggccgtgggtcgttcgtccttttactgcctggaatatttcc |
| | | | cgtcgcaaatgctaagaacgggtaacaacttccagttcagctacgagttt |
| | | | gagaacgtacctttccatagcagctacgctcacagccaaagcctggaccg |
| | | | actaatgaatccactcatcgaccaatacttgtactatctctcTaGAacta |
| | | | ttAACGGTTCTGGACAGAATCAAcaaacgctaaaattcagtgtggccgga |
| | | | cccagcaacatggctgtccagggaagaaactacatacctggacccagcta |
| | | | ccgacaacaacgtgtctcaaccactgtgactcaaaacaacaacagcgaat |
| | | | ttgcttggcctggagcttcttcttgggctctcaatggacgtaatagcttg |
| | | | atgaatcctggacctgctatggccagccacaaagaaggagaggaccgttt |
| | | | ctttcctttgtctggatctttaatttttggcaaacaaggTacCggCagag |
| | | | acaacgtggatgcggacaaagtcatgataaccaacgaagaagaaattaaa |
| | | | actactaacccggtagcaacggagtcctatggacaagtggccacaaacca |
| | | | ccagagtGCCCAGCAATCCCGTGATTTGTACAGAGCACAAGCACAAaccg |
| | | | gttgggttcaaaaccaaggaatacttccgggtatggtttggcaggacaga |
| | | | gatgtgtacctgcaaggacccatttgggccaaaattcctcacacggacgg |
| | | | caactttcacccttctccgctgatgggagggtttggaatgaagcacccgc |
| | | | ctcctcagatcctcatcaaaaacacacctgtacctgcggatcctccaacg |
| | | | gccttcaacaaggacaagctgaactctttcatcacccagtattctactgg |
| | | | ccaagtcagcgtggagatcgagtgggagctgcagaaggaaaacagcaagc |
| | | | gctggaacccggagatccagtacacttccaactattacaagtctaataat |
| | | | gttgaatttgctgttaatactgaaggtgtatatagtgaaccccgccccat |
| | | | tggcaccagatacctgactcgtaatctg |
| 235 | DNA | Adeno- | atggctgccgatggttatcttccagattggctcgaggacaaccttagtga |
| | | Associated | aggaattcgcgagtggtgggctttgaaacctggagcccctcaacccaagg |
| | | Virus 9 | caaatcaacaacatcaagacaacgctcgaggtcttgtgcttccgggttac |
| | | comprising | aaataccttggacccggcaacggactcgacaagggggagccggtcaacgc |
| | | SEQ | agcagacgcggcggccctcgagcacgacaaggcctacgaccagcagctca |
| | | ID NO: 22 | aggccggagacaacccgtacctcaagtacaaccacgccgacgccgagttc |
| | | | caggagcggctcaaagaagatacgtcttttgggggcaacctcgggcgagc |
| | | | agtcttccaggccaaaaagaggcttcttgaacctcttggtctggttgagg |
| | | | aagcggctaagacggctcctggaaagaagaggcctgtagagcagtctcct |
| | | | caggaaccggactcctccgcgggtattggcaaatcgggtgcacagcccgc |
| | | | taaaaagagactcaatttcggtcagactggcgacacagagtcagtcccag |
| | | | accctcaaccaatcggagaacctcccgcagccccctcaggtgtgggatct |
| | | | cttacaatggcttcaggtggtggcgcaccagtggcagacaataacgaagg |
| | | | tgccgatggagtgggtagttcctcgggaaattggcattgcgattcccaat |
| | | | ggctgggggacagagtcatcaccaccagcacccgaacctgggccctgccc |
| | | | acctacaacaatcacctctacaagcaaatctccaacagcacatctggagg |
| | | | atcttcaaatgacaacgcctacttcggctacagcaccccctgggggtatt |
| | | | ttgacttcaacagattccactgccacttctcaccacgtgactggcagcga |
| | | | ctcatcaacaacaactggggattccggcctaagcgactcaacttcaagct |
| | | | cttcaacattcaggtcaaagaggttacggacaacaatggagtcaagacca |
| | | | tcgccaataaccttaccagcacggtccaggtcttcacggactcagactat |
| | | | cagctcccgtacgtgctcgggtcggctcacgagggctgcctcccgccgtt |
| | | | cccagcggacgttttcatgattcctcagtacgggtatctgacgcttaatg |
| | | | atggaagccaggccgtgggtcgttcgtccttttactgcctggaatatttc |
| | | | ccgtcgcaaatgctaagaacgggtaacaacttccagttcagctacgagtt |
| | | | tgagaacgtacctttccatagcagctacgctcacagccaaagcctggacc |
| | | | gactaatgaatccactcatcgaccaatacttgtactatctctcTaGAact |
| | | | attAACGGTTCTGGACAGAATCAAcaaacgctaaaattcagtgtggccgg |
| | | | acccagcaacatggctgtccagggaagaaactacatacctggacccagct |
| | | | accgacaacaacgtgtctcaaccactgtgactcaaaacaacaacagcgaa |
| | | | tttgcttggcctggagcttcttcttgggctctcaatggacgtaatagctt |
| | | | gatgaatcctggacctgctatggccagccacaaagaaggagaggaccgtt |
| | | | tctttcctttgtctggatctttaatttttggcaaacaaggTacCggCaga |
| | | | gacaacgtggatgcggacaaagtcatgataaccaacgaagaagaaattaa |
| | | | aactactaacccggtagcaacggagtcctatggacaagtggccacaaacc |
| | | | accagagtGCCCAACAATCGCGGGATCTATATCGAGCCCAGGCGCAGacc |
| | | | ggttgggttcaaaaccaaggaatacttccgggtatggtttggcaggacag |
| | | | agatgtgtacctgcaaggacccatttgggccaaaattcctcacacggacg |
| | | | gcaactttcacccttctccgctgatgggagggtttggaatgaagcacccg |
| | | | cctcctcagatcctcatcaaaaacacacctgtacctgcggatcctccaac |
| | | | ggccttcaacaaggacaagctgaactctttcatcacccagtattctactg |
| | | | gccaagtcagcgtggagatcgagtgggagctgcagaaggaaaacagcaag |
| | | | cgctggaacccggagatccagtacacttccaactattacaagtctaataa |
| | | | tgttgaatttgctgttaatactgaaggtgtatatagtgaaccccgcccca |
| | | | ttggcaccagatacctgactcgtaatctg |
| 236 | DNA | Adeno- | atggctgccgatggttatcttccagattggctcgaggacaaccttagtga |
| | | Associated | aggaattcgcgagtggtgggctttgaaacctggagcccctcaacccaagg |
| | | Virus 9 | caaatcaacaacatcaagacaacgctcgaggtcttgtgcttccgggttac |
| | | comprising | aaataccttggacccggcaacggactcgacaagggggagccggtcaacgc |
| | | SEQ | agcagacgcggcggccctcgagcacgacaaggcctacgaccagcagctca |
| | | ID NO: 22 | aggccggagacaacccgtacctcaagtacaaccacgccgacgccgagttc |
| | | | caggagcggctcaaagaagatacgtcttttgggggcaacctcgggcgagc |
| | | | agtcttccaggccaaaaagaggcttcttgaacctcttggtctggttgagg |
| | | | aagcggctaagacggctcctggaaagaagaggcctgtagagcagtctcct |
| | | | caggaaccggactcctccgcgggtattggcaaatcgggtgcacagcccgc |
| | | | taaaaagagactcaatttcggtcagactggcgacacagagtcagtcccag |
| | | | accctcaaccaatcggagaacctcccgcagccccctcaggtgtgggatct |
| | | | cttacaatggcttcaggtggtggcgcaccagtggcagacaataacgaagg |
| | | | tgccgatggagtgggtagttcctcgggaaattggcattgcgattcccaat |
| | | | ggctgggggacagagtcatcaccaccagcacccgaacctgggccctgccc |
| | | | acctacaacaatcacctctacaagcaaatctccaacagcacatctggagg |
| | | | atcttcaaatgacaacgcctacttcggctacagcaccccctgggggtatt |
| | | | ttgacttcaacagattccactgccacttctcaccacgtgactggcagcga |
| | | | ctcatcaacaacaactggggattccggcctaagcgactcaacttcaagct |
| | | | cttcaacattcaggtcaaagaggttacggacaacaatggagtcaagacca |
| | | | tcgccaataaccttaccagcacggtccaggtcttcacggactcagactat |
| | | | agctcccgtacgtgctcgggtcggctcacgagggctgcctcccgccgttc |
| | | | ccagcggacgttttcatgattcctcagtacgggtatctgacgcttaatga |
| | | | tggaagccaggccgtgggtcgttcgtccttttactgcctggaatatttcc |
| | | | cgtcgcaaatgctaagaacgggtaacaacttccagttcagctacgagttt |
| | | | gagaacgtacctttccatagcagctacgctcacagccaaagcctggaccg |
| | | | actaatgaatccactcatcgaccaatacttgtactatctctcTaGAacta |
| | | | ttAACGGTTCTGGACAGAATCAAcaaacgctaaaattcagtgtggccgga |
| | | | cccagcaacatggctgtccagggaagaaactacatacctggacccagcta |
| | | | ccgacaacaacgtgtctcaaccactgtgactcaaaacaacaacagcgaat |
| | | | ttgcttggcctggagcttcttcttgggctctcaatggacgtaatagcttg |
| | | | atgaatcctggacctgctatggccagccacaaagaaggagaggaccgttt |
| | | | ctttcctttgtctggatctttaatttttggcaaacaaggTacCggCagag |
| | | | acaacgtggatgcggacaaagtcatgataaccaacgaagaagaaattaaa |
| | | | actactaacccggtagcaacggagtcctatggacaagtggccacaaacca |
| | | | ccagagtGCGCAACAGAGCAGAGACCTTTATCGTGCCCAGGCGCAGaccg |
| | | | gttgggttcaaaaccaaggaatacttccgggtatggtttggcaggacaga |
| | | | gatgtgtacctgcaaggacccatttgggccaaaattcctcacacggacgg |
| | | | caactttcacccttctccgctgatgggagggtttggaatgaagcacccgc |
| | | | ctcctcagatcctcatcaaaaacacacctgtacctgcggatcctccaacg |
| | | | gccttcaacaaggacaagctgaactctttcatcacccagtattctactgg |
| | | | ccaagtcagcgtggagatcgagtgggagctgcagaaggaaaacagcaagc |
| | | | gctggaacccggagatccagtacacttccaactattacaagtctaataat |
| | | | gttgaatttgctgttaatactgaaggtgtatatagtgaaccccgccccat |
| | | | tggcaccagatacctgactcgtaatctg |
| 237 | DNA | Adeno- | atggctgccgatggttatcttccagattggctcgaggacaaccttagtga |
| | | Associated | aggaattcgcgagtggtgggctttgaaacctggagcccctcaacccaagg |
| | | Virus 9 | caaatcaacaacatcaagacaacgctcgaggtcttgtgcttccgggttac |
| | | comprising | aaataccttggacccggcaacggactcgacaagggggagccggtcaacgc |
| | | SEQ | agcagacgcggcggccctcgagcacgacaaggcctacgaccagcagctca |
| | | ID NO: 22 | aggccggagacaacccgtacctcaagtacaaccacgccgacgccgagttc |
| | | | caggagcggctcaaagaagatacgtcttttgggggcaacctcgggcgagc |
| | | | agtcttccaggccaaaaagaggcttcttgaacctcttggtctggttgagg |
| | | | aagcggctaagacggctcctggaaagaagaggcctgtagagcagtctcct |
| | | | caggaaccggactcctccgcgggtattggcaaatcgggtgcacagcccgc |
| | | | taaaaagagactcaatttcggtcagactggcgacacagagtcagtcccag |
| | | | accctcaaccaatcggagaacctcccgcagccccctcaggtgtgggatct |
| | | | cttacaatggcttcaggtggtggcgcaccagtggcagacaataacgaagg |
| | | | tgccgatggagtgggtagttcctcgggaaattggcattgcgattcccaat |
| | | | ggctgggggacagagtcatcaccaccagcacccgaacctgggccctgccc |
| | | | acctacaacaatcacctctacaagcaaatctccaacagcacatctggagg |
| | | | atcttcaaatgacaacgcctacttcggctacagcaccccctgggggtatt |
| | | | ttgacttcaacagattccactgccacttctcaccacgtgactggcagcga |
| | | | ctcatcaacaacaactggggattccggcctaagcgactcaacttcaagct |
| | | | cttcaacattcaggtcaaagaggttacggacaacaatggagtcaagacca |
| | | | tcgccaataaccttaccagcacggtccaggtcttcacggactcagactat |
| | | | cagctcccgtacgtgctcgggtcggctcacgagggctgcctcccgccgtt |
| | | | cccagcggacgttttcatgattcctcagtacgggtatctgacgcttaatg |
| | | | atggaagccaggccgtgggtcgttcgtccttttactgcctggaatatttc |
| | | | ccgtcgcaaatgctaagaacgggtaacaacttccagttcagctacgagtt |
| | | | tgagaacgtacctttccatagcagctacgctcacagccaaagcctggacc |
| | | | gactaatgaatccactcatcgaccaatacttgtactatctctcTaGAact |
| | | | attAACGGTTCTGGACAGAATCAAcaaacgctaaaattcagtgtggccgg |
| | | | acccagcaacatggctgtccagggaagaaactacatacctggacccagct |
| | | | accgacaacaacgtgtctcaaccactgtgactcaaaacaacaacagcgaa |
| | | | tttgcttggcctggagcttcttcttgggctctcaatggacgtaatagctt |
| | | | gatgaatcctggacctgctatggccagccacaaagaaggagaggaccgtt |
| | | | tctttcctttgtctggatctttaatttttggcaaacaaggTacCggCaga |
| | | | gacaacgtggatgcggacaaagtcatgataaccaacgaagaagaaattaa |
| | | | aactactaacccggtagcaacggagtcctatggacaagtggccacaaacc |
| | | | accagagtGCGCAGCAGTCTCGAGACCTGTATCGTGCGCAAGCTCAGacc |
| | | | ggttgggttcaaaaccaaggaatacttccgggtatggtttggcaggacag |
| | | | agatgtgtacctgcaaggacccatttgggccaaaattcctcacacggacg |
| | | | gcaactttcacccttctccgctgatgggagggtttggaatgaagcacccg |
| | | | cctcctcagatcctcatcaaaaacacacctgtacctgcggatcctccaac |
| | | | ggccttcaacaaggacaagctgaactctttcatcacccagtattctactg |
| | | | gccaagtcagcgtggagatcgagtgggagctgcagaaggaaaacagcaag |
| | | | cgctggaacccggagatccagtacacttccaactattacaagtctaataa |
| | | | tgttgaatttgctgttaatactgaaggtgtatatagtgaaccccgcccca |
| | | | ttggcaccagatacctgactgtaatctg |
| 238 | DNA | Adeno- | atggctgccgatggttatcttccagattggctcgaggacaaccttagtga |
| | | Associated | aggaattcgcgagtggtgggctttgaaacctggagcccctcaacccaagg |
| | | Virus 9 | caaatcaacaacatcaagacaacgctcgaggtcttgtgcttccgggttac |
| | | comprising | aaataccttggacccggcaacggactcgacaagggggagccggtcaacgc |
| | | SEQ | agcagacgcggcggccctcgagcacgacaaggcctacgaccagcagctca |
| | | ID NO: 22 | aggccggagacaacccgtacctcaagtacaaccacgccgacgccgagttc |
| | | | caggagcggctcaaagaagatacgtcttttgggggcaacctcgggcgagc |
| | | | agtcttccaggccaaaaagaggcttcttgaacctcttggtctggttgagg |
| | | | aagcggctaagacggctcctggaaagaagaggcctgtagagcagtctcct |
| | | | caggaaccggactcctccgcgggtattggcaaatcgggtgcacagcccgc |
| | | | taaaaagagactcaatttcggtcagactggcgacacagagtcagtcccag |
| | | | accctcaaccaatcggagaacctcccgcagccccctcaggtgtgggatct |
| | | | cttacaatggcttcaggtggtggcgcaccagtggcagacaataacgaagg |
| | | | tgccgatggagtgggtagttcctcgggaaattggcattgcgattcccaat |
| | | | ggctgggggacagagtcatcaccaccagcacccgaacctgggccctgccc |
| | | | acctacaacaatcacctctacaagcaaatctccaacagcacatctggagg |
| | | | atcttcaaatgacaacgcctacttcggctacagcaccccctgggggtatt |
| | | | ttgacttcaacagattccactgccacttctcaccacgtgactggcagcga |
| | | | ctcatcaacaacaactggggattccggcctaagcgactcaacttcaagct |
| | | | cttcaacattcaggtcaaagaggttacggacaacaatggagtcaagacca |
| | | | tcgccaataaccttaccagcacggtccaggtcttcacggactcagactat |
| | | | cagctcccgtacgtgctcgggtcggctcacgagggctgcctcccgccgtt |
| | | | cccagcggacgttttcatgattcctcagtacgggtatctgacgcttaatg |
| | | | atggaagccaggccgtgggtcgttcgtccttttactgcctggaatatttc |
| | | | ccgtcgcaaatgctaagaacgggtaacaacttccagttcagctacgagtt |
| | | | tgagaacgtacctttccatagcagctacgctcacagccaaagcctggacc |
| | | | gactaatgaatccactcatcgaccaatacttgtactatctctcTaGAact |
| | | | attAACGGTTCTGGACAGAATCAAcaaacgctaaaattcagtgtggccgg |
| | | | acccagcaacatggctgtccagggaagaaactacatacctggacccagct |
| | | | accgacaacaacgtgtctcaaccactgtgactcaaaacaacaacagcgaa |
| | | | tttgcttggcctggagcttcttcttgggctctcaatggacgtaatagctt |
| | | | gatgaatcctggacctgctatggccagccacaaagaaggagaggaccgtt |
| | | | tctttcctttgtctggatctttaatttttggcaaacaaggTacCggCaga |
| | | | gacaacgtggatgcggacaaagtcatgataaccaacgaagaagaaattaa |
| | | | aactactaacccggtagcaacggagtcctatggacaagtggccacaaacc |
| | | | accagagtGCCCAACAATCACGCGATCTTTACCGCGCCCAGGCACAAacc |
| | | | ggttgggttcaaaaccaaggaatacttccgggtatggtttggcaggacag |
| | | | agatgtgtacctgcaaggacccatttgggccaaaattcctcacacggacg |
| | | | gcaactttcacccttctccgctgatgggagggtttggaatgaagcacccg |
| | | | cctcctcagatcctcatcaaaaacacacctgtacctgcggatcctccaac |
| | | | ggccttcaacaaggacaagctgaactctttcatcacccagtattctactg |
| | | | gccaagtcagcgtggagatcgagtgggagctgcagaaggaaaacagcaag |
| | | | cgctggaacccggagatccagtacacttccaactattacaagtctaataa |
| | | | tgttgaatttgctgttaatactgaaggtgtatatagtgaaccccgcccca |
| | | | ttggcaccagatacctgactcgtaatctg |
| 239 | DNA | Adeno- | atggctgccgatggttatcttccagattggctcgaggacaaccttagtga |
| | | Associated | aggaattcgcgagtggtgggctttgaaacctggagcccctcaacccaagg |
| | | Virus 9 | caaatcaacaacatcaagacaacgctcgaggtcttgtgcttccgggttac |
| | | comprising | aaataccttggacccggcaacggactcgacaagggggagccggtcaacgc |
| | | SEQ | agcagacgcggcggccctcgagcacgacaaggcctacgaccagcagctca |
| | | ID NO: 22 | aggccggagacaacccgtacctcaagtacaaccacgccgacgccgagttc |
| | | | caggagcggctcaaagaagatacgtcttttgggggcaacctcgggcgagc |
| | | | agtcttccaggccaaaaagaggcttcttgaacctcttggtctggttgagg |
| | | | aagcggctaagacggctcctggaaagaagaggcctgtagagcagtctcct |
| | | | caggaaccggactcctccgcgggtattggcaaatcgggtgcacagcccgc |
| | | | taaaaagagactcaatttcggtcagactggcgacacagagtcagtcccag |
| | | | accctcaaccaatcggagaacctcccgcagccccctcaggtgtgggatct |
| | | | cttacaatggcttcaggtggtggcgcaccagtggcagacaataacgaagg |
| | | | tgccgatggagtgggtagttcctcgggaaattggcattgcgattcccaat |
| | | | ggctgggggacagagtcatcaccaccagcacccgaacctgggccctgccc |
| | | | acctacaacaatcacctctacaagcaaatctccaacagcacatctggagg |
| | | | atcttcaaatgacaacgcctacttcggctacagcaccccctgggggtatt |
| | | | ttgacttcaacagattccactgccacttctcaccacgtgactggcagcga |
| | | | ctcatcaacaacaactggggattccggcctaagcgactcaacttcaagct |
| | | | cttcaacattcaggtcaaagaggttacggacaacaatggagtcaagacca |
| | | | tcgccaataaccttaccagcacggtccaggtcttcacggactcagactat |
| | | | cagctcccgtacgtgctcgggtcggctcacgagggctgcctcccgccgtt |
| | | | cccagcggacgttttcatgattcctcagtacgggtatctgacgcttaatg |
| | | | atggaagccaggccgtgggtcgttcgtccttttactgcctggaatatttc |
| | | | ccgtcgcaaatgctaagaacgggtaacaacttccagttcagctacgagtt |
| | | | tgagaacgtacctttccatagcagctacgctcacagccaaagcctggacc |
| | | | gactaatgaatccactcatcgaccaatacttgtactatctctcTaGAact |
| | | | attAACGGTTCTGGACAGAATCAAcaaacgctaaaattcagtgtggccgg |
| | | | acccagcaacatggctgtccagggaagaaactacatacctggacccagct |
| | | | accgacaacaacgtgtctcaaccactgtgactcaaaacaacaacagcgaa |
| | | | tttgcttggcctggagcttcttcttgggctctcaatggacgtaatagctt |
| | | | gatgaatcctggacctgctatggccagccacaaagaaggagaggaccgtt |
| | | | tctttcctttgtctggatctttaatttttggcaaacaaggTacCggCaga |
| | | | gacaacgtggatgcggacaaagtcatgataaccaacgaagaagaaattaa |
| | | | aactactaacccggtagcaacggagtcctatggacaagtggccacaaacc |
| | | | accagagtGCACAACAGTCGCGAGATCTGTACCGGGCGCAAGCGCAAacc |
| | | | ggttgggttcaaaaccaaggaatacttccgggtatggtttggcaggacag |
| | | | agatgtgtacctgcaaggacccatttgggccaaaattcctcacacggacg |
| | | | gcaactttcacccttctccgctgatgggagggtttggaatgaagcacccg |
| | | | cctcctcagatcctcatcaaaaacacacctgtacctgcggatcctccaac |
| | | | ggccttcaacaaggacaagctgaactctttcatcacccagtattctactg |
| | | | gccaagtcagcgtggagatcgagtgggagctgcagaaggaaaacagcaag |
| | | | cgctggaacccggagatccagtacacttccaactattacaagtctaataa |
| | | | tgttgaatttgctgttaatactgaaggtgtatatagtgaaccccgcccca |
| | | | ttggcaccagatacctgactcgtaatctg |
| 240 | DNA | Adeno- | atggctgccgatggttatcttccagattggctcgaggacaaccttagtga |
| | | Associated | aggaattcgcgagtggtgggctttgaaacctggagcccctcaacccaagg |
| | | Virus 9 | caaatcaacaacatcaagacaacgctcgaggtcttgtgcttccgggttac |
| | | comprising | aaataccttggacccggcaacggactcgacaagggggagccggtcaacgc |
| | | SEQ | agcagacgcggcggccctcgagcacgacaaggcctacgaccagcagctca |
| | | ID NO: 22 | aggccggagacaacccgtacctcaagtacaaccacgccgacgccgagttc |
| | | | caggagcggctcaaagaagatacgtcttttgggggcaacctcgggcgagc |
| | | | agtcttccaggccaaaaagaggcttcttgaacctcttggtctggttgagg |
| | | | aagcggctaagacggctcctggaaagaagaggcctgtagagcagtctcct |
| | | | caggaaccggactcctccgcgggtattggcaaatcgggtgcacagcccgc |
| | | | taaaaagagactcaatttcggtcagactggcgacacagagtcagtcccag |
| | | | accctcaaccaatcggagaacctcccgcagccccctcaggtgtgggatct |
| | | | cttacaatggcttcaggtggtggcgcaccagtggcagacaataacgaagg |
| | | | tgccgatggagtgggtagttcctcgggaaattggcattgcgattcccaat |
| | | | ggctgggggacagagtcatcaccaccagcacccgaacctgggccctgccc |
| | | | acctacaacaatcacctctacaagcaaatctccaacagcacatctggagg |
| | | | atcttcaaatgacaacgcctacttcggctacagcaccccctgggggtatt |
| | | | ttgacttcaacagattccactgccacttctcaccacgtgactggcagcga |
| | | | ctcatcaacaacaactggggattccggcctaagcgactcaacttcaagct |
| | | | cttcaacattcaggtcaaagaggttacggacaacaatggagtcaagacca |
| | | | tcgccaataaccttaccagcacggtccaggtcttcacggactcagactat |
| | | | cagctcccgtacgtgctcgggtcggctcacgagggctgcctcccgccgtt |
| | | | cccagcggacgttttcatgattcctcagtacgggtatctgacgcttaatg |
| | | | atggaagccaggccgtgggtcgttcgtccttttactgcctggaatatttc |
| | | | ccgtcgcaaatgctaagaacgggtaacaacttccagttcagctacgagtt |
| | | | tgagaacgtacctttccatagcagctacgctcacagccaaagcctggacc |
| | | | gactaatgaatccactcatcgaccaatacttgtactatctctcTaGAact |
| | | | attAACGGTTCTGGACAGAATCAAcaaacgctaaaattcagtgtggccgg |
| | | | acccagcaacatggctgtccagggaagaaactacatacctggacccagct |
| | | | accgacaacaacgtgtctcaaccactgtgactcaaaacaacaacagcgaa |
| | | | tttgcttggcctggagcttcttcttgggctctcaatggacgtaatagctt |
| | | | gatgaatcctggacctgctatggccagccacaaagaaggagaggaccgtt |
| | | | tctttcctttgtctggatctttaatttttggcaaacaaggTacCggCaga |
| | | | gacaacgtggatgcggacaaagtcatgataaccaacgaagaagaaattaa |
| | | | aactactaacccggtagcaacggagtcctatggacaagtggccacaaacc |
| | | | accagagtGCACAACAGAGCCGCGATTTATACCGGGCCCAAGCACAGacc |
| | | | ggttgggttcaaaaccaaggaatacttccgggtatggtttggcaggacag |
| | | | agatgtgtacctgcaaggacccatttgggccaaaattcctcacacggacg |
| | | | gcaactttcacccttctccgctgatgggagggtttggaatgaagcacccg |
| | | | cctcctcagatcctcatcaaaaacacacctgtacctgcggatcctccaac |
| | | | ggccttcaacaaggacaagctgaactctttcatcacccagtattctactg |
| | | | gccaagtcagcgtggagatcgagtgggagctgcagaaggaaaacagcaag |
| | | | cgctggaacccggagatccagtacacttccaactattacaagtctaataa |
| | | | tgttgaatttgctgttaatactgaaggtgtatatagtgaaccccgcccca |
| | | | ttggcaccagatacctgactcgtaatctg |
| 241 | DNA | Adeno- | atggctgccgatggttatcttccagattggctcgaggacaaccttagtga |
| | | Associated | aggaattcgcgagtggtgggctttgaaacctggagcccctcaacccaagg |
| | | Virus 9 | caaatcaacaacatcaagacaacgctcgaggtcttgtgcttccgggttac |
| | | comprising | aaataccttggacccggcaacggactcgacaagggggagccggtcaacgc |
| | | SEQ | agcagacgcggcggccctcgagcacgacaaggcctacgaccagcagctca |
| | | ID NO: 23 | aggrcggagacaacccgtacctcaagtacaaccacgccgacgccgagttc |
| | | | caggagcggctcaaagaagatacgtcttttgggggcaacctcgggcgagc |
| | | | agtcttccaggccaaaaagaggcttcttgaacctcttggtctggttgagg |
| | | | aagcggctaagacggctcctggaaagaagaggcctgtagagcagtctcct |
| | | | caggaaccggactcctccgcgggtattggcaaatcgggtgcacagcccgc |
| | | | taaaaagagactcaatttcggtcagactggcgacacagagtcagtcccag |
| | | | accctcaaccaatcggagaacctcccgcagccccctcaggtgtgggatct |
| | | | cttacaatggcttcaggtggtggcgcaccagtggcagacaataacgaagg |
| | | | tgccgatggagtgggtagttcctcgggaaattggcattgcgattcccaat |
| | | | ggctgggggacagagtcatcaccaccagcacccgaacctgggccctgccc |
| | | | acctacaacaatcacctctacaagcaaatctccaacagcacatctggagg |
| | | | atcttcaaatgacaacgcctacttcggctacagcaccccctgggggtatt |
| | | | ttgacttcaacagattccactgccacttctcaccacgtgactggcagcga |
| | | | ctcatcaacaacaactggggattccggcctaagcgactcaacttcaagct |
| | | | cttcaacattcaggtcaaagaggttacggacaacaatggagtcaagacca |
| | | | tcgccaataaccttaccagcacggtccaggtcttcacggactcagactat |
| | | | cagctcccgtacgtgctcgggtcggctcacgagggctgcctcccgccgtt |
| | | | cccagcggacgttttcatgattcctcagtacgggtatctgacgcttaatg |
| | | | atggaagccaggccgtgggtcgttcgtccttttactgcctggaatatttc |
| | | | ccgtcgcaaatgctaagaacgggtaacaacttccagttcagctacgagtt |
| | | | tgagaacgtacctttccatagcagctacgctcacagccaaagcctggacc |
| | | | gactaatgaatccactcatcgaccaatacttgtactatctctcTaGAact |
| | | | attAACGGTTCTGGACAGAATCAAcaaacgctaaaattcagtgtggccgg |
| | | | acccagcaacatggctgtccagggaagaaactacatacctggacccagct |
| | | | accgacaacaacgtgtctcaaccactgtgactcaaaacaacaacagcgaa |
| | | | tttgcttggcctggagcttcttcttgggctctcaatggacgtaatagctt |
| | | | gatgaatcctggacctgctatggccagccacaaagaaggagaggaccgtt |
| | | | tctttcctttgtctggatctttaatttttggcaaacaaggTacCggCaga |
| | | | gacaacgtggatgcggacaaagtcatgataaccaacgaagaagaaattaa |
| | | | aactactaacccggtagcaacggagtcctatggacaagtggccacaaacc |
| | | | accagagtGCGCAGGTCAACACGGTGCGCGAGTTCGCTCAAGCCCAGacc |
| | | | ggttgggttcaaaaccaaggaatacttccgggtatggtttggcaggacag |
| | | | agatgtgtacctgcaaggacccatttgggccaaaattcctcacacggacg |
| | | | gcaactttcacccttctccgctgatgggagggtttggaatgaagcacccg |
| | | | cctcctcagatcctcatcaaaaacacacctgtacctgcggatcctccaac |
| | | | ggccttcaacaaggacaagctgaactctttcatcacccagtattctactg |
| | | | gccaagtcagcgtggagatcgagtgggagctgcagaaggaaaacagcaag |
| | | | cgctggaacccggagatccagtacacttccaactattacaagtctaataa |
| | | | tgttgaatttgctgttaatactgaaggtgtatatagtgaaccccgcccca |
| | | | ttggcaccagatacctgactcgtaatctg |
| 242 | DNA | Adeno- | atggctgccgatggttatcttccagattggctcgaggacaaccttagtga |
| | | Associated | aggaattcgcgagtggtgggctttgaaacctggagcccctcaacccaagg |
| | | Virus 9 | caaatcaacaacatcaagacaacgctcgaggtcttgtgcttccgggttac |
| | | comprising | aaataccttggacccggcaacggactcgacaagggggagccggtcaacgc |
| | | SEQ | agcagacgcggcggccctcgagcacgacaaggcctacgaccagcagctca |
| | | ID NO: 23 | aggccggagacaacccgtacctcaagtacaaccacgccgacgccgagttc |
| | | | caggagggctcaaagaagatacgtcttttgggggcaacctcgggcgagca |
| | | | gtcttccaggccaaaaagaggcttcttgaacctcttggtctggttgagga |
| | | | agcggctaagacggctcctggaaagaagaggcctgtagagcagtctcctc |
| | | | aggaaccggactcctccggggtattggcaaatcgggtgcacagcccgcta |
| | | | aaaagagactcaatttcggtcagactggcgacacagagtcagtcccagac |
| | | | cctcaaccaatcggagaacctcccgcagccccctcaggtgtgggatctct |
| | | | tacaatggcttcaggtggtggcgcaccagtggcagacaataacgaaggtg |
| | | | ccgatggagtgggtagttcctcgggaaattggcattgcgattcccaatgg |
| | | | ctgggggacagagtcatcaccaccagcacccgaacctgggccctgcccac |
| | | | ctacaacaatcacctctacaagcaaatctccaacagcacatctggaggat |
| | | | cttcaaatgacaacgcctacttcggctacagcaccccctgggggtatttt |
| | | | gacttcaacagattccactgccacttctcaccacgtgactggcagcgact |
| | | | catcaacaacaactggggattccggcctaagcgactcaacttcaagctct |
| | | | tcaacattcaggtcaaagaggttacggacaacaatggagtcaagaccatc |
| | | | gccaataaccttaccagcacggtccaggtcttcacggactcagactatca |
| | | | gctcccgtacgtgctcgggtcggctcacgagggctgcctcccgccgttcc |
| | | | cagcggacgttttcatgattcctcagtacgggtatctgacgcttaatgat |
| | | | ggaagccaggccgtgggtcgttcgtccttttactgcctggaatatttccc |
| | | | gtcgcaaatgctaagaacgggtaacaacttccagttcagctacgagtttg |
| | | | agaacgtacctttccatagcagctacgctcacagccaaagcctggaccga |
| | | | ctaatgaatccactcatcgaccaatacttgtactatctctcTaGAactat |
| | | | tAACGGTTCTGGACAGAATCAAcaaacgctaaaattcagtgtggccggac |
| | | | ccagcaacatggctgtccagggaagaaactacatacctggacccagctac |
| | | | cgacaacaacgtgtctcaaccactgtgactcaaaacaacaacagcgaatt |
| | | | tgcttggcctggagcttcttcttgggctctcaatggacgtaatagcttga |
| | | | tgaatcctggacctgctatggccagccacaaagaaggagaggaccgtttc |
| | | | tttcctttgtctggatctttaatttttggcaaacaaggTacCggCagaga |
| | | | caacgtggatgcggacaaagtcatgataaccaacgaagaagaaattaaaa |
| | | | ctactaacccggtagcaacggagtcctatggacaagtggccacaaaccac |
| | | | cagagtGCACAAGTGAATACTGTCAGGGAATTTGCACAGGCACAAaccgg |
| | | | ttgggttcaaaaccaaggaatacttccgggtatggtttggcaggacagag |
| | | | atgtgtacctgcaaggacccatttgggccaaaattcctcacacggacggc |
| | | | aactttcacccttctccgctgatgggagggtttggaatgaagcacccgcc |
| | | | tcctcagatcctcatcaaaaacacacctgtacctgcggatcctccaacgg |
| | | | ccttcaacaaggacaagctgaactctttcatcacccagtattctactggc |
| | | | caagtcagcgtggagatcgagtgggagctgcagaaggaaaacagcaagcg |
| | | | ctggaacccggagatccagtacacttccaactattacaagtctaataatg |
| | | | ttgaatttgctgttaatactgaaggtgtatatagtgaaccccgccccatt |
| | | | ggcaccagatacctgactcgtaatctg |
| 243 | DNA | Adeno- | atggctgccgatggttatcttccagattggctcgaggacaaccttagtga |
| | | Associated | aggaattcgcgagtggtgggctttgaaacctggagcccctcaacccaagg |
| | | Virus 9 | caaatcaacaacatcaagacaacgctcgaggtcttgtgcttccgggttac |
| | | comprising | aaataccttggacccggcaacggactcgacaagggggagccggtcaacgc |
| | | SEQ | agcagacgcggcggccctcgagcacgacaaggcctacgaccagcagctca |
| | | ID NO: 23 | aggccggagacaacccgtacctcaagtacaaccacgccgacgccgagttc |
| | | | caggagcggctcaaagaagatacgtcttttgggggcaacctcgggcgagc |
| | | | agtcttccaggccaaaaagaggcttcttgaacctcttggtctggttgagg |
| | | | aagcggctaagacggctcctggaaagaagaggcctgtagagcagtctcct |
| | | | caggaaccggactcctccgcgggtattggcaaatcgggtgcacagcccgc |
| | | | taaaaagagactcaatttcggtcagactggcgacacagagtcagtcccag |
| | | | accctcaaccaatcggagaacctcccgcagccccctcaggtgtgggatct |
| | | | cttacaatggcttcaggtggtggcgcaccagtggcagacaataacgaagg |
| | | | tgccgatggagtgggtagttcctcgggaaattggcattgcgattcccaat |
| | | | ggctgggggacagagtcatcaccaccagcacccgaacctgggccctgccc |
| | | | acctacaacaatcacctctacaagcaaatctccaacagcacatctggagg |
| | | | atcttcaaatgacaacgcctacttcggctacagcaccccctgggggtatt |
| | | | ttgacttcaacagattccactgccacttctcaccacgtgactggcagcga |
| | | | ctcatcaacaacaactggggattccggcctaagcgactcaacttcaagct |
| | | | cttcaacattcaggtcaaagaggttacggacaacaatggagtcaagacca |
| | | | tcgccaataaccttaccagcacggtccaggtcttcacggactcagactat |
| | | | cagctcccgtacgtgctcgggtcggctcacgagggctgcctcccgccgtt |
| | | | cccagcggacgttttcatgattcctcagtacgggtatctgacgcttaatg |
| | | | atggaagccaggccgtgggtcgttcgtccttttactgcctggaatatttc |
| | | | ccgtcgcaaatgctaagaacgggtaacaacttccagttcagctacgagtt |
| | | | tgagaacgtacctttccatagcagctacgctcacagccaaagcctggacc |
| | | | gactaatgaatccactcatcgaccaatacttgtactatctctcTaGAact |
| | | | attAACGGTTCTGGACAGAATCAAcaaacgctaaaattcagtgtggccgg |
| | | | acccagcaacatggctgtccagggaagaaactacatacctggacccagct |
| | | | accgacaacaacgtgtctcaaccactgtgactcaaaacaacaacagcgaa |
| | | | tttgcttggcctggagcttcttcttgggctctcaatggacgtaatagctt |
| | | | gatgaatcctggacctgctatggccagccacaaagaaggagaggaccgtt |
| | | | tctttcctttgtctggatctttaatttttggcaaacaaggTacCggCaga |
| | | | gacaacgtggatgcggacaaagtcatgataaccaacgaagaagaaattaa |
| | | | aactactaacccggtagcaacggagtcctatggacaagtggccacaaacc |
| | | | accagagtGCGCAAGTTAACACTGTAAGAGAGTTTGCACAGGCTCAAacc |
| | | | ggttgggttcaaaaccaaggaatacttccgggtatggtttggcaggacag |
| | | | agatgtgtacctgcaaggacccatttgggccaaaattcctcacacggacg |
| | | | gcaactttcacccttctccgctgatgggagggtttggaatgaagcacccg |
| | | | cctcctcagatcctcatcaaaaacacacctgtacctgcggatcctccaac |
| | | | ggccttcaacaaggacaagctgaactctttcatcacccagtattctactg |
| | | | gccaagtcagcgtggagatcg |
| 244 | DNA | Adeno- | agtgggagctgcagaaggaaaacagcaagcgctggaacccggagatccag |
| | | Associated | tacacttccaactattacaagtctaataatgttgaatttgctgttaatac |
| | | Virus 9 | tgaaggtgtatatagtgaaccccgccccattggcaccagatacctgactc |
| | | comprising | gtaatctgatggctgccgatggttatcttccagattggctcgaggacaac |
| | | SEQ | cttagtgaaggaattcgcgagtggtgggctttgaaacctggagcccctca |
| | | ID NO: 23 | acccaaggcaaatcaacaacatcaagacaacgctcgaggtcttgtgcttc |
| | | | cgggttacaaataccttggacccggcaacggactcgacaagggggagccg |
| | | | gtcaacgcagcagacgcggcggccctcgagcacgacaaggcctacgacca |
| | | | gcagctcaaggrcggagacaacccgtacctcaagtacaaccacgccgacg |
| | | | ccgagttccaggagcggctcaaagaagatacgtcttttgggggcaacctc |
| | | | gggcgagcagtcttccaggccaaaaagaggcttcttgaacctcttggtct |
| | | | ggttgaggaagcggctaagacggctcctggaaagaagaggcctgtagagc |
| | | | agtctcctcaggaaccggactcctccgcgggtattggcaaatcgggtgca |
| | | | cagcccgctaaaaagagactcaatttcggtcagactggcgacacagagtc |
| | | | agtcccagaccctcaaccaatcggagaacctcccgcagccccctcaggtg |
| | | | tgggatctcttacaatggcttcaggtggtggcgcaccagtggcagacaat |
| | | | aacgaaggtgccgatggagtgggtagttcctcgggaaattggcattgcga |
| | | | ttcccaatggctgggggacagagtcatcaccaccagcacccgaacctggg |
| | | | ccctgcccacctacaacaatcacctctacaagcaaatctccaacagcaca |
| | | | tctggaggatcttcaaatgacaacgcctacttcggctacagcaccccctg |
| | | | ggggtattttgacttcaacagattccactgccacttctcaccacgtgact |
| | | | ggcagcgactcatcaacaacaactggggattccggcctaagcgactcaac |
| | | | ttcaagctcttcaacattcaggtcaaagaggttacggacaacaatggagt |
| | | | caagaccatcgccaataaccttaccagcacggtccaggtcttcacggact |
| | | | cagactatcagctcccgtacgtgctcgggtcggctcacgagggctgcctc |
| | | | ccgccgttcccagcggacgttttcatgattcctcagtacgggtatctgac |
| | | | gcttaatgatggaagccaggccgtgggtcgttcgtccttttactgcctgg |
| | | | aatatttcccgtcgcaaatgctaagaacgggtaacaacttccagttcagc |
| | | | tacgagtttgagaacgtacctttccatagcagctacgctcacagccaaag |
| | | | cctggaccgactaatgaatccactcatcgaccaatacttgtactatctct |
| | | | cTaGAactattAACGGTTCTGGACAGAATCAAcaaacgctaaaattcagt |
| | | | gtggccggacccagcaacatggctgtccagggaagaaactacatacctgg |
| | | | acccagctaccgacaacaacgtgtctcaaccactgtgactcaaaacaaca |
| | | | acagcgaatttgcttggcctggagcttcttcttgggctctcaatggacgt |
| | | | aatagcttgatgaatcctggacctgctatggccagccacaaagaaggaga |
| | | | ggaccgtttctttcctttgtctggatctttaatttttggcaaacaaggTa |
| | | | cCggCagagacaacgtggatgcggacaaagtcatgataaccaacgaagaa |
| | | | gaaattaaaactactaacccggtagcaacggagtcctatggacaagtggc |
| | | | cacaaaccaccagagtGCCCAGGTTAACACGGTACGGGAGTTTGCACAAG |
| | | | CCCAGaccggttgggttcaaaaccaaggaatacttccgggtatggtttgg |
| | | | caggacagagatgtgtacctgcaaggacccatttgggccaaaattcctca |
| | | | cacggacggcaactttcacccttctccgctgatgggagggtttggaatga |
| | | | agcacccgcctcctcagatcctcatcaaaaacacacctgtacctgcggat |
| | | | cctccaacggccttcaacaaggacaagctgaactctttcatcacccagta |
| | | | ttctactggccaagtcagcgtggagatcgagtgggagctgcagaaggaaa |
| | | | acagcaagcgctggaacccggagatccagtacacttccaactattacaag |
| | | | tctaataatgttgaatttgctgttaatactgaaggtgtatatagtgaacc |
| | | | ccgccccattggcaccagatacctgactcgtaatctg |
| 245 | DNA | Adeno- | atggctgccgatggttatcttccagattggctcgaggacaaccttagtga |
| | | Associated | aggaattcgcgagtggtgggctttgaaacctggagcccctcaacccaagg |
| | | Virus 9 | caaatcaacaacatcaagacaacgctcgaggtcttgtgcttccgggttac |
| | | comprising | aaataccttggacccggcaacggactcgacaagggggagccggtcaacgc |
| | | SEQ | agcagacgcggcggccctcgagcacgacaaggcctacgaccagcagctca |
| | | ID NO: 23 | aggrcggagacaacccgtacctcaagtacaaccacgccgacgccgagttc |
| | | | caggagcggctcaaagaagatacgtcttttgggggcaacctcgggcgagc |
| | | | agtcttccaggccaaaaagaggcttcttgaacctcttggtctggttgagg |
| | | | aagcggctaagacggctcctggaaagaagaggcctgtagagcagtctcct |
| | | | caggaaccggactcctccgcgggtattggcaaatcgggtgcacagcccgc |
| | | | taaaaagagactcaatttcggtcagactggcgacacagagtcagtcccag |
| | | | accctcaaccaatcggagaacctcccgcagccccctcaggtgtgggatct |
| | | | cttacaatggcttcaggtggtggcgcaccagtggcagacaataacgaagg |
| | | | tgccgatggagtgggtagttcctcgggaaattggcattgcgattcccaat |
| | | | ggctgggggacagagtcatcaccaccagcacccgaacctgggccctgccc |
| | | | acctacaacaatcacctctacaagcaaatctccaacagcacatctggagg |
| | | | atcttcaaatgacaacgcctacttcggctacagcaccccctgggggtatt |
| | | | ttgacttcaacagattccactgccacttctcaccacgtgactggcagcga |
| | | | ctcatcaacaacaactggggattccggcctaagcgactcaacttcaagct |
| | | | cttcaacattcaggtcaaagaggttacggacaacaatggagtcaagacca |
| | | | tcgccaataaccttaccagcacggtccaggtcttcacggactcagactat |
| | | | cagctcccgtacgtgctcgggtcggctcacgagggctgcctcccgccgtt |
| | | | cccagcggacgttttcatgattcctcagtacgggtatctgacgcttaatg |
| | | | atggaagccaggccgtgggtcgttcgtccttttactgcctggaatatttc |
| | | | ccgtcgcaaatgctaagaacgggtaacaacttccagttcagctacgagtt |
| | | | tgagaacgtacctttccatagcagctacgctcacagccaaagcctggacc |
| | | | gactaatgaatccactcatcgaccaatacttgtactatctctcTaGAact |
| | | | attAACGGTTCTGGACAGAATCAAcaaacgctaaaattcagtgtggccgg |
| | | | acccagcaacatggctgtccagggaagaaactacatacctggacccagct |
| | | | accgacaacaacgtgtctcaaccactgtgactcaaaacaacaacagcgaa |
| | | | tttgcttggcctggagcttcttcttgggctctcaatggacgtaatagctt |
| | | | gatgaatcctggacctgctatggccagccacaaagaaggagaggaccgtt |
| | | | tctttcctttgtctggatctttaatttttggcaaacaaggTacCggCaga |
| | | | gacaacgtggatgcggacaaagtcatgataaccaacgaagaagaaattaa |
| | | | aactactaacccggtagcaacggagtcctatggacaagtggccacaaacc |
| | | | accagagtGCGCAGGTGAACACCGTAAGGGAGTTCGCCCAAGCCCAGacc |
| | | | ggttgggttcaaaaccaaggaatacttccgggtatggtttggcaggacag |
| | | | agatgtgtacctgcaaggacccatttgggccaaaattcctcacacggacg |
| | | | gcaactttcacccttctccgctgatgggagggtttggaatgaagcacccg |
| | | | cctcctcagatcctcatcaaaaacacacctgtacctgcggatcctccaac |
| | | | ggccttcaacaaggacaagctgaactctttcatcacccagtattctactg |
| | | | gccaagtcagcgtggagatcgagtgggagctgcagaaggaaaacagcaag |
| | | | cgctggaacccggagatccagtacacttccaactattacaagtctaataa |
| | | | tgttgaatttgctgttaatactgaaggtgtatatagtgaaccccgcccca |
| | | | ttggcaccagatacctgactgtaatctg |
| 246 | DNA | Adeno- | atggctgccgatggttatcttccagattggctcgaggacaaccttagtga |
| | | Associated | aggaattcgcgagtggtgggctttgaaacctggagcccctcaacccaagg |
| | | Virus 9 | caaatcaacaacatcaagacaacgctcgaggtcttgtgcttccgggttac |
| | | comprising | aaataccttggacccggcaacggactcgacaagggggagccggtcaacgc |
| | | SEQ | agcagacgcggcggccctcgagcacgacaaggcctacgaccagcagctca |
| | | ID NO: 23 | aggccggagacaacccgtacctcaagtacaaccacgccgacgccgagttc |
| | | | caggagcggctcaaagaagatacgtcttttgggggcaacctcgggcgagc |
| | | | agtcttccaggccaaaaagaggcttcttgaacctcttggtctggttgagg |
| | | | aagcggctaagacggctcctggaaagaagaggcctgtagagcagtctcct |
| | | | caggaaccggactcctccgcgggtattggcaaatcgggtgcacagcccgc |
| | | | taaaaagagactcaatttcggtcagactggcgacacagagtcagtcccag |
| | | | accctcaaccaatcggagaacctcccgcagccccctcaggtgtgggatct |
| | | | cttacaatggcttcaggtggtggcgcaccagtggcagacaataacgaagg |
| | | | tgccgatggagtgggtagttcctcgggaaattggcattgcgattcccaat |
| | | | ggctgggggacagagtcatcaccaccagcacccgaacctgggccctgccc |
| | | | acctacaacaatcacctctacaagcaaatctccaacagcacatctggagg |
| | | | atcttcaaatgacaacgcctacttcggctacagcaccccctgggggtatt |
| | | | ttgacttcaacagattccactgccacttctcaccacgtgactggcagcga |
| | | | ctcatcaacaacaactggggattccggcctaagcgactcaacttcaagct |
| | | | cttcaacattcaggtcaaagaggttacggacaacaatggagtcaagacca |
| | | | tcgccaataaccttaccagcacggtccaggtcttcacggactcagactat |
| | | | cagctcccgtacgtgctcgggtcggctcacgagggctgcctcccgccgtt |
| | | | cccagcggacgttttcatgattcctcagtacgggtatctgacgcttaatg |
| | | | atggaagccaggccgtgggtcgttcgtccttttactgcctggaatatttc |
| | | | ccgtcgcaaatgctaagaacgggtaacaacttccagttcagctacgagtt |
| | | | tgagaacgtacctttccatagcagctacgctcacagccaaagcctggacc |
| | | | gactaatgaatccactcatcgaccaatacttgtactatctctcTaGAact |
| | | | attAACGGTTCTGGACAGAATCAAcaaacgctaaaattcagtgtggccgg |
| | | | acccagcaacatggctgtccagggaagaaactacatacctggacccagct |
| | | | accgacaacaacgtgtctcaaccactgtgactcaaaacaacaacagcgaa |
| | | | tttgcttggcctggagcttcttcttgggctctcaatggacgtaatagctt |
| | | | gatgaatcctggacctgctatggccagccacaaagaaggagaggaccgtt |
| | | | tctttcctttgtctggatctttaatttttggcaaacaaggTacCggCaga |
| | | | gacaacgtggatgcggacaaagtcatgataaccaacgaagaagaaattaa |
| | | | aactactaacccggtagcaacggagtcctatggacaagtggccacaaacc |
| | | | accagagtGCTCAGGTGAATACAGTCAGGGAATTCGCGCAAGCACAGacc |
| | | | ggttgggttcaaaaccaaggaatacttccgggtatggtttggcaggacag |
| | | | agatgtgtacctgcaaggacccatttgggccaaaattcctcacacggacg |
| | | | gcaactttcacccttctccgctgatgggagggtttggaatgaagcacccg |
| | | | cctcctcagatcctcatcaaaaacacacctgtacctgcggatcctccaac |
| | | | ggccttcaacaaggacaagctgaactctttcatcacccagtattctactg |
| | | | gccaagtcagcgtggagatcgagtgggagctgcagaaggaaaacagcaag |
| | | | cgctggaacccggagatccagtacacttccaactattacaagtctaataa |
| | | | tgttgaatttgctgttaatactgaaggtgtatatagtgaaccccgcccca |
| | | | ttggcaccagatacctgactcgtaatctg |
| 247 | DNA | Adeno- | atggctgccgatggttatcttccagattggctcgaggacaaccttagtga |
| | | Associated | aggaattcgcgagtggtgggctttgaaacctggagcccctcaacccaagg |
| | | Virus 9 | caaatcaacaacatcaagacaacgctcgaggtcttgtgcttccgggttac |
| | | comprising | aaataccttggacccggcaacggactcgacaagggggagccggtcaacgc |
| | | SEQ | agcagacgcggcggccctcgagcacgacaaggcctacgaccagcagctca |
| | | ID NO: 23 | aggccggagacaacccgtacctcaagtacaaccacgccgacgccgagttc |
| | | | caggagcggctcaaagaagatacgtcttttgggggcaacctcgggcgagc |
| | | | agtcttccaggccaaaaagaggcttcttgaacctcttggtctggttgagg |
| | | | aagcggctaagacggctcctggaaagaagaggcctgtagagcagtctcct |
| | | | caggaaccggactcctccgcgggtattggcaaatcgggtgcacagcccgc |
| | | | taaaaagagactcaatttcggtcagactggcgacacagagtcagtcccag |
| | | | accctcaaccaatcggagaacctcccgcagccccctcaggtgtgggatct |
| | | | cttacaatggcttcaggtggtggcgcaccagtggcagacaataacgaagg |
| | | | tgccgatggagtgggtagttcctcgggaaattggcattgcgattcccaat |
| | | | ggctgggggacagagtcatcaccaccagcacccgaacctgggccctgccc |
| | | | acctacaacaatcacctctacaagcaaatctccaacagcacatctggagg |
| | | | atcttcaaatgacaacgcctacttcggctacagcaccccctgggggtatt |
| | | | ttgacttcaacagattccactgccacttctcaccacgtgactggcagcga |
| | | | ctcatcaacaacaactggggattccggcctaagcgactcaacttcaagct |
| | | | cttcaacattcaggtcaaagaggttacggacaacaatggagtcaagacca |
| | | | tcgccaataaccttaccagcacggtccaggtcttcacggactcagactat |
| | | | cagctcccgtacgtgctcgggtcggctcacgagggctgcctcccgccgtt |
| | | | cccagcggacgttttcatgattcctcagtacgggtatctgacgcttaatg |
| | | | atggaagccaggccgtgggtcgttcgtccttttactgcctggaatatttc |
| | | | ccgtcgcaaatgctaagaacgggtaacaacttccagttcagctacgagtt |
| | | | tgagaacgtacctttccatagcagctacgctcacagccaaagcctggacc |
| | | | gactaatgaatccactcatcgaccaatacttgtactatctctcTaGAact |
| | | | attAACGGTTCTGGACAGAATCAAcaaacgctaaaattcagtgtggccgg |
| | | | acccagcaacatggctgtccagggaagaaactacatacctggacccagct |
| | | | accgacaacaacgtgtctcaaccactgtgactcaaaacaacaacagcgaa |
| | | | tttgcttggcctggagcttcttcttgggctctcaatggacgtaatagctt |
| | | | gatgaatcctggacctgctatggccagccacaaagaaggagaggaccgtt |
| | | | tctttcctttgtctggatctttaatttttggcaaacaaggTacCggCaga |
| | | | gacaacgtggatgcggacaaagtcatgataaccaacgaagaagaaattaa |
| | | | aactactaacccggtagcaacggagtcctatggacaagtggccacaaacc |
| | | | accagagtGCACAAGTAAATACAGTTCGCGAATTTGCTCAGGCACAAacc |
| | | | ggttgggttcaaaaccaaggaatacttccgggtatggtttggcaggacag |
| | | | agatgtgtacctgcaaggacccatttgggccaaaattcctcacacggacg |
| | | | gcaactttcacccttctccgctgatgggagggtttggaatgaagcacccg |
| | | | cctcctcagatcctcatcaaaaacacacctgtacctgcggatcctccaac |
| | | | ggccttcaacaaggacaagctgaactctttcatcacccagtattctactg |
| | | | gccaagtcagcgtggagatcgagtgggagctgcagaaggaaaacagcaag |
| | | | cgctggaacccggagatccagtacacttccaactattacaagtctaataa |
| | | | tgttgaatttgctgttaatactgaaggtgtatatagtgaaccccgcccca |
| | | | ttggcaccagatacctgactcgtaatctg |
| 248 | | Adeno- | atggctgccgatggttatcttccagattggctcgaggacaaccttagtga |
| | | Associated | aggaattcgcgagtggtgggctttgaaacctggagcccctcaacccaagg |
| | | Virus 9 | caaatcaacaacatcaagacaacgctcgaggtcttgtgcttccgggttac |
| | | comprising | aaataccttggacccggcaacggactcgacaagggggagccggtcaacgc |
| | | SEQ | agcagacgcggcggccctcgagcacgacaaggcctacgaccagcagctca |
| | | ID NO: 23 | aggccggagacaacccgtacctcaagtacaaccacgccgacgccgagttc |
| | | | caggagcggctcaaagaagatacgtcttttgggggcaacctcgggcgagc |
| | | | agtcttccaggccaaaaagaggcttcttgaacctcttggtctggttgagg |
| | | | aagcggctaagacggctcctggaaagaagaggcctgtagagcagtctcct |
| | | | caggaaccggactcctccgcgggtattggcaaatcgggtgcacagcccgc |
| | | | taaaaagagactcaatttcggtcagactggcgacacagagtcagtcccag |
| | | | accctcaaccaatcggagaacctcccgcagccccctcaggtgtgggatct |
| | | | cttacaatggcttcaggtggtggcgcaccagtggcagacaataacgaagg |
| | | | tgccgatggagtgggtagttcctcgggaaattggcattgcgattcccaat |
| | | | ggctgggggacagagtcatcaccaccagcacccgaacctgggccctgccc |
| | | | acctacaacaatcacctctacaagcaaatctccaacagcacatctggagg |
| | | | atcttcaaatgacaacgcctacttcggctacagcaccccctgggggtatt |
| | | | ttgacttcaacagattccactgccacttctcaccacgtgactggcagcga |
| | | | ctcatcaacaacaactggggattccggcctaagcgactcaacttcaagct |
| | | | cttcaacattcaggtcaaagaggttacggacaacaatggagtcaagacca |
| | | | tcgccaataaccttaccagcacggtccaggtcttcacggactcagactat |
| | | | cagctcccgtacgtgctcgggtcggctcacgagggctgcctcccgccgtt |
| | | | cccagcggacgttttcatgattcctcagtacgggtatctgacgcttaatg |
| | | | atggaagccaggccgtgggtcgttcgtccttttactgcctggaatatttc |
| | | | ccgtcgcaaatgctaagaacgggtaacaacttccagttcagctacgagtt |
| | | | tgagaacgtacctttccatagcagctacgctcacagccaaagcctggacc |
| | | | gactaatgaatccactcatcgaccaatacttgtactatctctcTaGAact |
| | | | attAACGGTTCTGGACAGAATCAAcaaacgctaaaattcagtgtggccgg |
| | | | acccagcaacatggctgtccagggaagaaactacatacctggacccagct |
| | | | accgacaacaacgtgtctcaaccactgtgactcaaaacaacaacagcgaa |
| | | | tttgcttggcctggagcttcttcttgggctctcaatggacgtaatagctt |
| | | | gatgaatcctggacctgctatggccagccacaaagaaggagaggaccgtt |
| | | | tctttcctttgtctggatctttaatttttggcaaacaaggTacCggCaga |
| | | | gacaacgtggatgcggacaaagtcatgataaccaacgaagaagaaattaa |
| | | | aactactaacccggtagcaacggagtcctatggacaagtggccacaaacc |
| | | | accagagtGCACAGGTAAACACAGTGAGGGAATTTGCACAGGCTCAAacc |
| | | | ggttgggttcaaaaccaaggaatacttccgggtatggtttggcaggacag |
| | | | agatgtgtacctgcaaggacccatttgggccaaaattcctcacacggacg |
| | | | gcaactttcacccttctccgctgatgggagggtttggaatgaagcacccg |
| | | | cctcctcagatcctcatcaaaaacacacctgtacctgcggatcctccaac |
| | | | ggccttcaacaaggacaagctgaactctttcatcacccagtattctactg |
| | | | gccaagtcagcgtggagatcgagtgggagctgcagaaggaaaacagcaag |
| | | | cgctggaacccggagatccagtacacttccaactattacaagtctaataa |
| | | | tgttgaatttgctgttaatactgaaggtgtatatagtgaaccccgcccca |
| | | | ttggcaccagatacctgactcgtaatctg |
| 249 | DNA | Adeno- | atggctgccgatggttatcttccagattggctcgaggacaaccttagtga |
| | | Associated | aggaattcgcgagtggtgggctttgaaacctggagcccctcaacccaagg |
| | | Virus 9 | caaatcaacaacatcaagacaacgctcgaggtcttgtgcttccgggttac |
| | | comprising | aaataccttggacccggcaacggactcgacaagggggagccggtcaacgc |
| | | SEQ | agcagacgcggcggccctcgagcacgacaaggcctacgaccagcagctca |
| | | ID NO: 23 | aggccggagacaacccgtacctcaagtacaaccacgccgacgccgagttc |
| | | | caggagcggctcaaagaagatacgtcttttgggggcaacctcgggcgagc |
| | | | agtcttccaggccaaaaagaggcttcttgaacctcttggtctggttgagg |
| | | | aagcggctaagacggctcctggaaagaagaggcctgtagagcagtctcct |
| | | | caggaaccggactcctccgcgggtattggcaaatcgggtgcacagcccgc |
| | | | taaaaagagactcaatttcggtcagactggcgacacagagtcagtcccag |
| | | | accctcaaccaatcggagaacctcccgcagccccctcaggtgtgggatct |
| | | | cttacaatggcttcaggtggtggcgcaccagtggcagacaataacgaagg |
| | | | tgccgatggagtgggtagttcctcgggaaattggcattgcgattcccaat |
| | | | ggctgggggacagagtcatcaccaccagcacccgaacctgggccctgccc |
| | | | acctacaacaatcacctctacaagcaaatctccaacagcacatctggagg |
| | | | atcttcaaatgacaacgcctacttcggctacagcaccccctgggggtatt |
| | | | ttgacttcaacagattccactgccacttctcaccacgtgactggcagcga |
| | | | ctcatcaacaacaactggggattccggcctaagcgactcaacttcaagct |
| | | | cttcaacattcaggtcaaagaggttacggacaacaatggagtcaagacca |
| | | | tcgccaataaccttaccagcacggtccaggtcttcacggactcagactat |
| | | | cagctcccgtacgtgctcgggtcggctcacgagggctgcctcccgccgtt |
| | | | cccagcggacgttttcatgattcctcagtacgggtatctgacgcttaatg |
| | | | atggaagccaggccgtgggtcgttcgtccttttactgcctggaatatttc |
| | | | ccgtcgcaaatgctaagaacgggtaacaacttccagttcagctacgagtt |
| | | | tgagaacgtacctttccatagcagctacgctcacagccaaagcctggacc |
| | | | gactaatgaatccactcatcgaccaatacttgtactatctctcTaGAact |
| | | | attAACGGTTCTGGACAGAATCAAcaaacgctaaaattcagtgtggccgg |
| | | | acccagcaacatggctgtccagggaagaaactacatacctggacccagct |
| | | | accgacaacaacgtgtctcaaccactgtgactcaaaacaacaacagcgaa |
| | | | tttgcttggcctggagcttcttcttgggctctcaatggacgtaatagctt |
| | | | gatgaatcctggacctgctatggccagccacaaagaaggagaggaccgtt |
| | | | tctttcctttgtctggatctttaatttttggcaaacaaggTacCggCaga |
| | | | gacaacgtggatgcggacaaagtcatgataaccaacgaagaagaaattaa |
| | | | aactactaacccggtagcaacggagtcctatggacaagtggccacaaacc |
| | | | accagagtGCTCAAGTCAATACGGTACGTGAGTTCGCGCAAGCACAGacc |
| | | | ggttgggttcaaaaccaaggaatacttccgggtatggtttggcaggacag |
| | | | agatgtgtacctgcaaggacccatttgggccaaaattcctcacacggacg |
| | | | gcaactttcacccttctccgctgatgggagggtttggaatgaagcacccg |
| | | | cctcctcagatcctcatcaaaaacacacctgtacctgcggatcctccaac |
| | | | ggccttcaacaaggacaagctgaactctttcatcacccagtattctactg |
| | | | gccaagtcagcgtggagatcgagtgggagctgcagaaggaaaacagcaag |
| | | | cgctggaacccggagatccagtacacttccaactattacaagtctaataa |
| | | | tgttgaatttgctgttaatactgaaggtgtatatagtgaaccccgcccca |
| | | | ttggcaccagatacctgactcgtaatctg |
| 250 | DNA | Adeno- | atggctgccgatggttatcttccagattggctcgaggacaaccttagtga |
| | | Associated | aggaattcgcgagtggtgggctttgaaacctggagcccctcaacccaagg |
| | | Virus 9 | caaatcaacaacatcaagacaacgctcgaggtcttgtgcttccgggttac |
| | | comprising | aaataccttggacccggcaacggactcgacaagggggagccggtcaacgc |
| | | SEQ | agcagacgcggcggccctcgagcacgacaaggcctacgaccagcagctca |
| | | ID NO: 23 | aggccggagacaacccgtacctcaagtacaaccacgccgacgccgagttc |
| | | | caggagcggctcaaagaagatacgtcttttgggggcaacctcgggcgagc |
| | | | agtcttccaggccaaaaagaggcttcttgaacctcttggtctggttgagg |
| | | | aagcggctaagacggctcctggaaagaagaggcctgtagagcagtctcct |
| | | | caggaaccggactcctccgcgggtattggcaaatcgggtgcacagcccgc |
| | | | taaaaagagactcaatttcggtcagactggcgacacagagtcagtcccag |
| | | | accctcaaccaatcggagaacctcccgcagccccctcaggtgtgggatct |
| | | | cttacaatggcttcaggtggtggcgcaccagtggcagacaataacgaagg |
| | | | tgccgatggagtgggtagttcctcgggaaattggcattgcgattcccaat |
| | | | ggctgggggacagagtcatcaccaccagcacccgaacctgggccctgccc |
| | | | acctacaacaatcacctctacaagcaaatctccaacagcacatctggagg |
| | | | atcttcaaatgacaacgcctacttcggctacagcaccccctgggggtatt |
| | | | ttgacttcaacagattccactgccacttctcaccacgtgactggcagcga |
| | | | ctcatcaacaacaactggggattccggcctaagcgactcaacttcaagct |
| | | | cttcaacattcaggtcaaagaggttacggacaacaatggagtcaagacca |
| | | | tcgccaataaccttaccagcacggtccaggtcttcacggactcagactat |
| | | | cagctcccgtacgtgctcgggtcggctcacgagggctgcctcccgccgtt |
| | | | cccagcggacgttttcatgattcctcagtacgggtatctgacgcttaatg |
| | | | atggaagccaggccgtgggtcgttcgtccttttactgcctggaatatttc |
| | | | ccgtcgcaaatgctaagaacgggtaacaacttccagttcagctacgagtt |
| | | | tgagaacgtacctttccatagcagctacgctcacagccaaagcctggacc |
| | | | gactaatgaatccactcatcgaccaatacttgtactattctcTaGAacta |
| | | | ttAACGGTTCTGGACAGAATCAAcaaacgctaaaattcagtgtggccgga |
| | | | cccagcaacatggctgtccagggaagaaactacatacctggacccagcta |
| | | | ccgacaacaacgtgtctcaaccactgtgactcaaaacaacaacagcgaat |
| | | | ttgcttggcctggagcttcttcttgggctctcaatggacgtaatagcttg |
| | | | atgaatcctggacctgctatggccagccacaaagaaggagaggaccgttt |
| | | | ctttcctttgtctggatctttaatttttggcaaacaaggTacCggCagag |
| | | | acaacgtggatgcggacaaagtcatgataaccaacgaagaagaaattaaa |
| | | | actactaacccggtagcaacggagtcctatggacaagtggccacaaacca |
| | | | ccagagtGCTCAAGTAAATACCGTCAGAGAATTCGCTCAGGCGCAAaccg |
| | | | gttgggttcaaaaccaaggaatacttccgggtatggtttggcaggacaga |
| | | | gatgtgtacctgcaaggacccatttgggccaaaattcctcacacggacgg |
| | | | caactttcacccttctccgctgatgggagggtttggaatgaagcacccgc |
| | | | ctcctcagatcctcatcaaaaacacacctgtacctgcggatcctccaacg |
| | | | gccttcaacaaggacaagctgaactctttcatcacccagtattctactgg |
| | | | ccaagtcagcgtggagatcgagtgggagctgcagaaggaaaacagcaagc |
| | | | gctggaacccggagatccagtacacttccaactattacaagtctaataat |
| | | | gttgaatttgctgttaatactgaaggtgtatatagtgaaccccgccccat |
| | | | tggcaccagatacctgactcgtaatctg |

[0220] Various modifications and variations of the described methods, pharmaceutical compositions, and kits of the invention will be apparent to those skilled in the art without departing from the scope and spirit of the invention. Although the invention has been described in connection with specific embodiments, it will be understood that it is capable of further modifications and that the invention as claimed should not be unduly limited to such specific embodiments. Indeed, various modifications of the described modes for carrying out the invention that are obvious to those skilled in the art are intended to be within the scope of the invention. This application is intended to cover any variations, uses, or adaptations of the invention following, in general, the principles of the invention and including such departures from the present disclosure come within known customary practice within the art to which the invention pertains and may be applied to the essential features herein before set forth.

The application's sequence listing, which the Patent Office published only in electronic form, follows.

SEQUENCE LISTING (252 sequences)

SEQ ID NO: 1 - protein, 736 aa, Adeno-Associated Virus 9
MAADGYLPDWLEDNLSEGIREWWALKPGAPQPKANQQHQDNARGLVLPGYKYLGPGNGLDKGEPVNAADAAALEHDKAYDQQLKAGDNPYLKYNHADAEFQERLKEDTSFGGNLGRAVFQAKKRLLEPLGLVEEAAKTAPGKKRPVEQSPQEPDSSAGIGKSGAQPAKKRLNFGQTGDTESVPDPQPIGEPPAAPSGVGSLTMASGGGAPVADNNEGADGVGSSSGNWHCDSQWLGDRVITTSTRTWALPTYNNHLYKQISNSTSGGSSNDNAYFGYSTPWGYFDFNRFHCHFSPRDWQRLINNNWGFRPKRLNFKLFNIQVKEVTDNNGVKTIANNLTSTVQVFTDSDYQLPYVLGSAHEGCLPPFPADVFMIPQYGYLTLNDGSQAVGRSSFYCLEYFPSQMLRTGNNFQFSYEFENVPFHSSYAHSQSLDRLMNPLIDQYLYYLSRTINGSGQNQQTLKFSVAGPSNMAVQGRNYIPGPSYRQQRVSTTVTQNNNSEFAWPGASSWALNGRNSLMNPGPAMASHKEGEDRFFPLSGSLIFGKQGTGRDNVDADKVMITNEEEIKTTNPVATESYGQVATNHQSAQAQAQTGWVQNQGILPGMVWQDRDVYLQGPIWAKIPHTDGNFHPSPLMGGFGMKHPPPQILIKNTPVPADPPTAFNKDKLNSFITQYSTGQVSVEIEWELQKENSKRWNPEIQYTSNYYKSNNVEFAVNTEGVYSEPRPIGTRYLTRNL

SEQ ID NO: 2 - DNA, 2208 bp, Adeno-Associated Virus 9
  source 1..2208: mol_type = other DNA
atggctgccgatggttatcttccagattggctcgaggacaaccttagtgaaggaattcgcgagtggtgggctttgaaacctggagcccctcaacccaaggcaaatcaacaacatcaagacaacgctcgaggtcttgtgcttccgggttacaaataccttggacccggcaacggactcgacaagggggagccggtcaacgcagcagacgcggcggccctcgagcacgacaaggcctacgaccagcagctcaaggccggagacaacccgtacctcaagtacaaccacgccgacgccgagttccaggagcggctcaaagaagatacgtcttttgggggcaacctcgggcgagcagtcttccaggccaaaaagaggcttcttgaacctcttggtctggttgaggaagcggctaagacggctcctggaaagaagaggcctgtagagcagtctcctcaggaaccggactcctccgcgggtattggcaaatcgggtgcacagcccgctaaaaagagactcaatttcggtcagactggcgacacagagtcagtcccagaccctcaaccaatcggagaacctcccgcagccccctcaggtgtgggatctcttacaatggcttcaggtggtggcgcaccagtggcagacaataacgaaggtgccgatggagtgggtagttcctcgggaaattggcattgcgattcccaatggctgggggacagagtcatcaccaccagcacccgaacctgggccctgcccacctacaacaatcacctctacaagcaaatctccaacagcacatctggaggatcttcaaatgacaacgcctacttcggctacagcaccccctgggggtattttgacttcaacagattccactgccacttctcaccacgtgactggcagcgactcatcaacaacaactggggattccggcctaagcgactcaacttcaagctcttcaacattcaggtcaaagaggttacggacaacaatggagtcaagaccatcgccaataaccttaccagcacggtccaggtcttcacggactcagactatcagctcccgtacgtgctcgggtcggctcacgagggctgcctcccgccgttcccagcggacgttttcatgattcctcagtacgggtatctgacgcttaatgatggaagccaggccgtgggtcgttcgtccttttactgcctggaatatttcccgtcgcaaatgctaagaacgggtaacaacttccagttcagctacgagtttgagaacgtacctttccatagcagctacgctcacagccaaagcctggaccgactaatgaatccactcatcgaccaatacttgtactatctctctagaactattaacggttctggacagaatcaacaaacgctaaaattcagtgtggccggacccagcaacatggctgtccagggaagaaactacatacctggacccagctaccgacaacaacgtgtctcaaccactgtgactcaaaacaacaacagcgaatttgcttggcctggagcttcttcttgggctctcaatggacgtaatagcttgatgaatcctggacctgctatggccagccacaaagaaggagaggaccgtttctttcctttgtctggatctttaatttttggcaaacaaggtaccggcagagacaacgtggatgcggacaaagtcatgataaccaacgaagaagaaattaaaactactaacccggtagcaacggagtcctatggacaagtggccacaaaccaccagagtgcccaagcacaggcgcagaccggttgggttcaaaaccaaggaatacttccgggtatggtttggcaggacagagatgtgtacctgcaaggacccatttgggccaaaattcctcacacggacggcaactttcacccttctccgctgatgggagggtttggaatgaagcacccgcctcctcagatcctcatcaaaaacacacctgtacctgcggatcctccaacggccttcaacaaggacaagctgaactctttcatcacccagtattctactggccaagtcagcgtggagatcgagtgggagctgcagaaggaaaacagcaagcgctggaacccggagatccagtacacttccaactattacaagtctaataatgttgaatttgctgttaatactgaaggtgtatatagtgaaccccgccccattggcaccagatacctgactcgtaatctg

SEQ ID NO: 3 - protein, 7 aa, Adeno-Associated Virus 9
ELNPREF

SEQ ID NO: 4 - protein, 7 aa, Adeno-Associated Virus 9
GKLPREF

SEQ ID NO: 5 - protein, 7 aa, Adeno-Associated Virus 9
HNFPNEF

SEQ ID NO: 6 - protein, 7 aa, Adeno-Associated Virus 9
IRMPTEF

SEQ ID NO: 7 - protein, 7 aa, Adeno-Associated Virus 9
IRQPQEF

SEQ ID NO: 8 - protein, 7 aa, Adeno-Associated Virus 9
IRVPNEF

SEQ ID NO: 9 - protein, 7 aa, Adeno-Associated Virus 9
KGPGYEH

SEQ ID NO: 10 - protein, 7 aa, Adeno-Associated Virus 9
KNSPSEF

SEQ ID NO: 11 - protein, 7 aa, Adeno-Associated Virus 9
LALPQEF

SEQ ID NO: 12 - protein, 7 aa, Adeno-Associated Virus 9
QNIPSEY

SEQ ID NO: 13 - protein, 7 aa, Adeno-Associated Virus 9
QRIPQEY

SEQ ID NO: 14 - protein, 7 aa, Adeno-Associated Virus 9
RSQPQEH

SEQ ID NO: 15 - protein, 7 aa, Adeno-Associated Virus 9
TARPNEY

SEQ ID NO: 16 - protein, 7 aa, Adeno-Associated Virus 9
TRTPVEF

SEQ ID NO: 17 - protein, 7 aa, Adeno-Associated Virus 9
ENHTRDK

SEQ ID NO: 18 - protein, 7 aa, Adeno-Associated Virus 9
GNDTRST

SEQ ID NO: 19 - protein, 7 aa, Adeno-Associated Virus 9
MNSTISK

SEQ ID NO: 20 - protein, 7 aa, Adeno-Associated Virus 9
QSRDLYR

SEQ ID NO: 21 - protein, 7 aa, Adeno-Associated Virus 9
VNTVREF

SEQ ID NO: 22 - protein, 743 aa, Adeno-Associated Virus 9
MAADGYLPDWLEDNLSEGIREWWALKPGAPQPKANQQHQDNARGLVLPGYKYLGPGNGLDKGEPVNAADAAALEHDKAYDQQLKAGDNPYLKYNHADAEFQERLKEDTSFGGNLGRAVFQAKKRLLEPLGLVEEAAKTAPGKKRPVEQSPQEPDSSAGIGKSGAQPAKKRLNFGQTGDTESVPDPQPIGEPPAAPSGVGSLTMASGGGAPVADNNEGADGVGSSSGNWHCDSQWLGDRVITTSTRTWALPTYNNHLYKQISNSTSGGSSNDNAYFGYSTPWGYFDFNRFHCHFSPRDWQRLINNNWGFRPKRLNFKLFNIQVKEVTDNNGVKTIANNLTSTVQVFTDSDYQLPYVLGSAHEGCLPPFPADVFMIPQYGYLTLNDGSQAVGRSSFYCLEYFPSQMLRTGNNFQFSYEFENVPFHSSYAHSQSLDRLMNPLIDQYLYYLSRTINGSGQNQQTLKFSVAGPSNMAVQGRNYIPGPSYRQQRVSTTVTQNNNSEFAWPGASSWALNGRNSLMNPGPAMASHKEGEDRFFPLSGSLIFGKQGTGRDNVDADKVMITNEEEIKTTNPVATESYGQVATNHQSAQELNPREFAQAQTGWVQNQGILPGMVWQDRDVYLQGPIWAKIPHTDGNFHPSPLMGGFGMKHPPPQILIKNTPVPADPPTAFNKDKLNSFITQYSTGQVSVEIEWELQKENSKRWNPEIQYTSNYYKSNNVEFAVNTEGVYSEPRPIGTRYLTRNL

SEQ ID NO: 23 - protein, 743 aa, Adeno-Associated Virus 9
MAADGYLPDWLEDNLSEGIREWWALKPGAPQPKANQQHQDNARGLVLPGYKYLGPGNGLDKGEPVNAADAAALEHDKAYDQQLKAGDNPYLKYNHADAEFQERLKEDTSFGGNLGRAVFQAKKRLLEPLGLVEEAAKTAPGKKRPVEQSPQEPDSSAGIGKSGAQPAKKRLNFGQTGDTESVPDPQPIGEPPAAPSGVGSLTMASGGGAPVADNNEGADGVGSSSGNWHCDSQWLGDRVITTSTRTWALPTYNNHLYKQISNSTSGGSSNDNAYFGYSTPWGYFDFNRFHCHFSPRDWQRLINNNWGFRPKRLNFKLFNIQVKEVTDNNGVKTIANNLTSTVQVFTDSDYQLPYVLGSAHEGCLPPFPADVFMIPQYGYLTLNDGSQAVGRSSFYCLEYFPSQMLRTGNNFQFSYEFENVPFHSSYAHSQSLDRLMNPLIDQYLYYLSRTINGSGQNQQTLKFSVAGPSNMAVQGRNYIPGPSYRQQRVSTTVTQNNNSEFAWPGASSWALNGRNSLMNPGPAMASHKEGEDRFFPLSGSLIFGKQGTGRDNVDADKVMITNEEEIKTTNPVATESYGQVATNHQSAQGKLPREFAQAQTGWVQNQGILPGMVWQDRDVYLQGPIWAKIPHTDGNFHPSPLMGGFGMKHPPPQILIKNTPVPADPPTAFNKDKLNSFITQYSTGQVSVEIEWELQKENSKRWNPEIQYTSNYYKSNNVEFAVNTEGVYSEPRPIGTRYLTRNL

SEQ ID NO: 24 - protein, 743 aa, Adeno-Associated Virus 9
MAADGYLPDWLEDNLSEGIREWWALKPGAPQPKANQQHQDNARGLVLPGYKYLGPGNGLDKGEPVNAADAAALEHDKAYDQQLKAGDNPYLKYNHADAEFQERLKEDTSFGGNLGRAVFQAKKRLLEPLGLVEEAAKTAPGKKRPVEQSPQEPDSSAGIGKSGAQPAKKRLNFGQTGDTESVPDPQPIGEPPAAPSGVGSLTMASGGGAPVADNNEGADGVGSSSGNWHCDSQWLGDRVITTSTRTWALPTYNNHLYKQISNSTSGGSSNDNAYFGYSTPWGYFDFNRFHCHFSPRDWQRLINNNWGFRPKRLNFKLFNIQVKEVTDNNGVKTIANNLTSTVQVFTDSDYQLPYVLGSAHEGCLPPFPADVFMIPQYGYLTLNDGSQAVGRSSFYCLEYFPSQMLRTGNNFQFSYEFENVPFHSSYAHSQSLDRLMNPLIDQYLYYLSRTINGSGQNQQTLKFSVAGPSNMAVQGRNYIPGPSYRQQRVSTTVTQNNNSEFAWPGASSWALNGRNSLMNPGPAMASHKEGEDRFFPLSGSLIFGKQGTGRDNVDADKVMITNEEEIKTTNPVATESYGQVATNHQSAQHNFPNEFAQAQTGWVQNQGILPGMVWQDRDVYLQGPIWAKIPHTDGNFHPSPLMGGFGMKHPPPQILIKNTPVPADPPTAFNKDKLNSFITQYSTGQVSVEIEWELQKENSKRWNPEIQYTSNYYKSNNVEFAVNTEGVYSEPRPIGTRYLTRNL

SEQ ID NO: 25 - protein, 743 aa, Adeno-Associated Virus 9
MAADGYLPDWLEDNLSEGIREWWALKPGAPQPKANQQHQDNARGLVLPGYKYLGPGNGLDKGEPVNAADAAALEHDKAYDQQLKAGDNPYLKYNHADAEFQERLKEDTSFGGNLGRAVFQAKKRLLEPLGLVEEAAKTAPGKKRPVEQSPQEPDSSAGIGKSGAQPAKKRLNFGQTGDTESVPDPQPIGEPPAAPSGVGSLTMASGGGAPVADNNEGADGVGSSSGNWHCDSQWLGDRVITTSTRTWALPTYNNHLYKQISNSTSGGSSNDNAYFGYSTPWGYFDFNRFHCHFSPRDWQRLINNNWGFRPKRLNFKLFNIQVKEVTDNNGVKTIANNLTSTVQVFTDSDYQLPYVLGSAHEGCLPPFPADVFMIPQYGYLTLNDGSQAVGRSSFYCLEYFPSQMLRTGNNFQFSYEFENVPFHSSYAHSQSLDRLMNPLIDQYLYYLSRTINGSGQNQQTLKFSVAGPSNMAVQGRNYIPGPSYRQQRVSTTVTQNNNSEFAWPGASSWALNGRNSLMNPGPAMASHKEGEDRFFPLSGSLIFGKQGTGRDNVDADKVMITNEEEIKTTNPVATESYGQVATNHQSAQIRMPTEFAQAQTGWVQNQGILPGMVWQDRDVYLQGPIWAKIPHTDGNFHPSPLMGGFGMKHPPPQILIKNTPVPADPPTAFNKDKLNSFITQYSTGQVSVEIEWELQKENSKRWNPEIQYTSNYYKSNNVEFAVNTEGVYSEPRPIGTRYLTRNL

SEQ ID NO: 26 - protein, 743 aa, Adeno-Associated Virus 9
MAADGYLPDWLEDNLSEGIREWWALKPGAPQPKANQQHQDNARGLVLPGYKYLGPGNGLDKGEPVNAADAAALEHDKAYDQQLKAGDNPYLKYNHADAEFQERLKEDTSFGGNLGRAVFQAKKRLLEPLGLVEEAAKTAPGKKRPVEQSPQEPDSSAGIGKSGAQPAKKRLNFGQTGDTESVPDPQPIGEPPAAPSGVGSLTMASGGGAPVADNNEGADGVGSSSGNWHCDSQWLGDRVITTSTRTWALPTYNNHLYKQISNSTSGGSSNDNAYFGYSTPWGYFDFNRFHCHFSPRDWQRLINNNWGFRPKRLNFKLFNIQVKEVTDNNGVKTIANNLTSTVQVFTDSDYQLPYVLGSAHEGCLPPFPADVFMIPQYGYLTLNDGSQAVGRSSFYCLEYFPSQMLRTGNNFQFSYEFENVPFHSSYAHSQSLDRLMNPLIDQYLYYLSRTINGSGQNQQTLKFSVAGPSNMAVQGRNYIPGPSYRQQRVSTTVTQNNNSEFAWPGASSWALNGRNSLMNPGPAMASHKEGEDRFFPLSGSLIFGKQGTGRDNVDADKVMITNEEEIKTTNPVATESYGQVATNHQSAQIRQPQEFAQAQTGWVQNQGILPGMVWQDRDVYLQGPIWAKIPHTDGNFHPSPLMGGFGMKHPPPQILIKNTPVPADPPTAFNKDKLNSFITQYSTGQVSVEIEWELQKENSKRWNPEIQYTSNYYKSNNVEFAVNTEGVYSEPRPIGTRYLTRNL

SEQ ID NO: 27 - protein, 743 aa, Adeno-Associated Virus 9
MAADGYLPDWLEDNLSEGIREWWALKPGAPQPKANQQHQDNARGLVLPGYKYLGPGNGLDKGEPVNAADAAALEHDKAYDQQLKAGDNPYLKYNHADAEFQERLKEDTSFGGNLGRAVFQAKKRLLEPLGLVEEAAKTAPGKKRPVEQSPQEPDSSAGIGKSGAQPAKKRLNFGQTGDTESVPDPQPIGEPPAAPSGVGSLTMASGGGAPVADNNEGADGVGSSSGNWHCDSQWLGDRVITTSTRTWALPTYNNHLYKQISNSTSGGSSNDNAYFGYSTPWGYFDFNRFHCHFSPRDWQRLINNNWGFRPKRLNFKLFNIQVKEVTDNNGVKTIANNLTSTVQVFTDSDYQLPYVLGSAHEGCLPPFPADVFMIPQYGYLTLNDGSQAVGRSSFYCLEYFPSQMLRTGNNFQFSYEFENVPFHSSYAHSQSLDRLMNPLIDQYLYYLSRTINGSGQNQQTLKFSVAGPSNMAVQGRNYIPGPSYRQQRVSTTVTQNNNSEFAWPGASSWALNGRNSLMNPGPAMASHKEGEDRFFPLSGSLIFGKQGTGRDNVDADKVMITNEEEIKTTNPVATESYGQVATNHQSAQIRVPNEFAQAQTGWVQNQGILPGMVWQDRDVYLQGPIWAKIPHTDGNFHPSPLMGGFGMKHPPPQILIKNTPVPADPPTAFNKDKLNSFITQYSTGQVSVEIEWELQKENSKRWNPEIQYTSNYYKSNNVEFAVNTEGVYSEPRPIGTRYLTRNL

SEQ ID NO: 28 - protein, 743 aa, Adeno-Associated Virus 9
MAADGYLPDWLEDNLSEGIREWWALKPGAPQPKANQQHQDNARGLVLPGYKYLGPGNGLDKGEPVNAADAAALEHDKAYDQQLKAGDNPYLKYNHADAEFQERLKEDTSFGGNLGRAVFQAKKRLLEPLGLVEEAAKTAPGKKRPVEQSPQEPDSSAGIGKSGAQPAKKRLNFGQTGDTESVPDPQPIGEPPAAPSGVGSLTMASGGGAPVADNNEGADGVGSSSGNWHCDSQWLGDRVITTSTRTWALPTYNNHLYKQISNSTSGGSSNDNAYFGYSTPWGYFDFNRFHCHFSPRDWQRLINNNWGFRPKRLNFKLFNIQVKEVTDNNGVKTIANNLTSTVQVFTDSDYQLPYVLGSAHEGCLPPFPADVFMIPQYGYLTLNDGSQAVGRSSFYCLEYFPSQMLRTGNNFQFSYEFENVPFHSSYAHSQSLDRLMNPLIDQYLYYLSRTINGSGQNQQTLKFSVAGPSNMAVQGRNYIPGPSYRQQRVSTTVTQNNNSEFAWPGASSWALNGRNSLMNPGPAMASHKEGEDRFFPLSGSLIFGKQGTGRDNVDADKVMITNEEEIKTTNPVATESYGQVATNHQSAQKGPGYEHAQAQTGWVQNQGILPGMVWQDRDVYLQGPIWAKIPHTDGNFHPSPLMGGFGMKHPPPQILIKNTPVPADPPTAFNKDKLNSFITQYSTGQVSVEIEWELQKENSKRWNPEIQYTSNYYKSNNVEFAVNTEGVYSEPRPIGTRYLTRNL

SEQ ID NO: 29 - protein, 743 aa, Adeno-Associated Virus 9
MAADGYLPDWLEDNLSEGIREWWALKPGAPQPKANQQHQDNARGLVLPGYKYLGPGNGLDKGEPVNAADAAALEHDKAYDQQLKAGDNPYLKYNHADAEFQERLKEDTSFGGNLGRAVFQAKKRLLEPLGLVEEAAKTAPGKKRPVEQSPQEPDSSAGIGKSGAQPAKKRLNFGQTGDTESVPDPQPIGEPPAAPSGVGSLTMASGGGAPVADNNEGADGVGSSSGNWHCDSQWLGDRVITTSTRTWALPTYNNHLYKQISNSTSGGSSNDNAYFGYSTPWGYFDFNRFHCHFSPRDWQRLINNNWGFRPKRLNFKLFNIQVKEVTDNNGVKTIANNLTSTVQVFTDSDYQLPYVLGSAHEGCLPPFPADVFMIPQYGYLTLNDGSQAVGRSSFYCLEYFPSQMLRTGNNFQFSYEFENVPFHSSYAHSQSLDRLMNPLIDQYLYYLSRTINGSGQNQQTLKFSVAGPSNMAVQGRNYIPGPSYRQQRVSTTVTQNNNSEFAWPGASSWALNGRNSLMNPGPAMASHKEGEDRFFPLSGSLIFGKQGTGRDNVDADKVMITNEEEIKTTNPVATESYGQVATNHQSAQKNSPSEFAQAQTGWVQNQGILPGMVWQDRDVYLQGPIWAKIPHTDGNFHPSPLMGGFGMKHPPPQILIKNTPVPADPPTAFNKDKLNSFITQYSTGQVSVEIEWELQKENSKRWNPEIQYTSNYYKSNNVEFAVNTEGVYSEPRPIGTRYLTRNL

SEQ ID NO: 30 - protein, 743 aa, Adeno-Associated Virus 9
MAADGYLPDWLEDNLSEGIREWWALKPGAPQPKANQQHQDNARGLVLPGYKYLGPGNGLDKGEPVNAADAAALEHDKAYDQQLKAGDNPYLKYNHADAEFQERLKEDTSFGGNLGRAVFQAKKRLLEPLGLVEEAAKTAPGKKRPVEQSPQEPDSSAGIGKSGAQPAKKRLNFGQTGDTESVPDPQPIGEPPAAPSGVGSLTMASGGGAPVADNNEGADGVGSSSGNWHCDSQWLGDRVITTSTRTWALPTYNNHLYKQISNSTSGGSSNDNAYFGYSTPWGYFDFNRFHCHFSPRDWQRLINNNWGFRPKRLNFKLFNIQVKEVTDNNGVKTIANNLTSTVQVFTDSDYQLPYVLGSAHEGCLPPFPADVFMIPQYGYLTLNDGSQAVGRSSFYCLEYFPSQMLRTGNNFQFSYEFENVPFHSSYAHSQSLDRLMNPLIDQYLYYLSRTINGSGQNQQTLKFSVAGPSNMAVQGRNYIPGPSYRQQRVSTTVTQNNNSEFAWPGASSWALNGRNSLMNPGPAMASHKEGEDRFFPLSGSLIFGKQGTGRDNVDADKVMITNEEEIKTTNPVATESYGQVATNHQSAQLALPQEFAQAQTGWVQNQGILPGMVWQDRDVYLQGPIWAKIPHTDGNFHPSPLMGGFGMKHPPPQILIKNTPVPADPPTAFNKDKLNSFITQYSTGQVSVEIEWELQKENSKRWNPEIQYTSNYYKSNNVEFAVNTEGVYSEPRPIGTRYLTRNL

SEQ ID NO: 31 - protein, 743 aa, Adeno-Associated Virus 9
MAADGYLPDWLEDNLSEGIREWWALKPGAPQPKANQQHQDNARGLVLPGYKYLGPGNGLDKGEPVNAADAAALEHDKAYDQQLKAGDNPYLKYNHADAEFQERLKEDTSFGGNLGRAVFQAKKRLLEPLGLVEEAAKTAPGKKRPVEQSPQEPDSSAGIGKSGAQPAKKRLNFGQTGDTESVPDPQPIGEPPAAPSGVGSLTMASGGGAPVADNNEGADGVGSSSGNWHCDSQWLGDRVITTSTRTWALPTYNNHLYKQISNSTSGGSSNDNAYFGYSTPWGYFDFNRFHCHFSPRDWQRLINNNWGFRPKRLNFKLFNIQVKEVTDNNGVKTIANNLTSTVQVFTDSDYQLPYVLGSAHEGCLPPFPADVFMIPQYGYLTLNDGSQAVGRSSFYCLEYFPSQMLRTGNNFQFSYEFENVPFHSSYAHSQSLDRLMNPLIDQYLYYLSRTINGSGQNQQTLKFSVAGPSNMAVQGRNYIPGPSYRQQRVSTTVTQNNNSEFAWPGASSWALNGRNSLMNPGPAMASHKEGEDRFFPLSGSLIFGKQGTGRDNVDADKVMITNEEEIKTTNPVATESYGQVATNHQSAQQNIPSEYAQAQTGWVQNQGILPGMVWQDRDVYLQGPIWAKIPHTDGNFHPSPLMGGFGMKHPPPQILIKNTPVPADPPTAFNKDKLNSFITQYSTGQVSVEIEWELQKENSKRWNPEIQYTSNYYKSNNVEFAVNTEGVYSEPRPIGTRYLTRNL

SEQ ID NO: 32 - protein, 743 aa, Adeno-Associated Virus 9
MAADGYLPDWLEDNLSEGIREWWALKPGAPQPKANQQHQDNARGLVLPGYKYLGPGNGLDKGEPVNAADAAALEHDKAYDQQLKAGDNPYLKYNHADAEFQERLKEDTSFGGNLGRAVFQAKKRLLEPLGLVEEAAKTAPGKKRPVEQSPQEPDSSAGIGKSGAQPAKKRLNFGQTGDTESVPDPQPIGEPPAAPSGVGSLTMASGGGAPVADNNEGADGVGSSSGNWHCDSQWLGDRVITTSTRTWALPTYNNHLYKQISNSTSGGSSNDNAYFGYSTPWGYFDFNRFHCHFSPRDWQRLINNNWGFRPKRLNFKLFNIQVKEVTDNNGVKTIANNLTSTVQVFTDSDYQLPYVLGSAHEGCLPPFPADVFMIPQYGYLTLNDGSQAVGRSSFYCLEYFPSQMLRTGNNFQFSYEFENVPFHSSYAHSQSLDRLMNPLIDQYLYYLSRTINGSGQNQQTLKFSVAGPSNMAVQGRNYIPGPSYRQQRVSTTVTQNNNSEFAWPGASSWALNGRNSLMNPGPAMASHKEGEDRFFPLSGSLIFGKQGTGRDNVDADKVMITNEEEIKTTNPVATESYGQVATNHQSAQQRIPQEYAQAQTGWVQNQGILPGMVWQDRDVYLQGPIWAKIPHTDGNFHPSPLMGGFGMKHPPPQILIKNTPVPADPPTAFNKDKLNSFITQYSTGQVSVEIEWELQKENSKRWNPEIQYTSNYYKSNNVEFAVNTEGVYSEPRPIGTRYLTRNL

SEQ ID NO: 33 - protein, 743 aa, Adeno-Associated Virus 9
MAADGYLPDWLEDNLSEGIREWWALKPGAPQPKANQQHQDNARGLVLPGYKYLGPGNGLDKGEPVNAADAAALEHDKAYDQQLKAGDNPYLKYNHADAEFQERLKEDTSFGGNLGRAVFQAKKRLLEPLGLVEEAAKTAPGKKRPVEQSPQEPDSSAGIGKSGAQPAKKRLNFGQTGDTESVPDPQPIGEPPAAPSGVGSLTMASGGGAPVADNNEGADGVGSSSGNWHCDSQWLGDRVITTSTRTWALPTYNNHLYKQISNSTSGGSSNDNAYFGYSTPWGYFDFNRFHCHFSPRDWQRLINNNWGFRPKRLNFKLFNIQVKEVTDNNGVKTIANNLTSTVQVFTDSDYQLPYVLGSAHEGCLPPFPADVFMIPQYGYLTLNDGSQAVGRSSFYCLEYFPSQMLRTGNNFQFSYEFENVPFHSSYAHSQSLDRLMNPLIDQYLYYLSRTINGSGQNQQTLKFSVAGPSNMAVQGRNYIPGPSYRQQRVSTTVTQNNNSEFAWPGASSWALNGRNSLMNPGPAMASHKEGEDRFFPLSGSLIFGKQGTGRDNVDADKVMITNEEEIKTTNPVATESYGQVATNHQSAQRSQPQEHAQAQTGWVQNQGILPGMVWQDRDVYLQGPIWAKIPHTDGNFHPSPLMGGFGMKHPPPQILIKNTPVPADPPTAFNKDKLNSFITQYSTGQVSVEIEWELQKENSKRWNPEIQYTSNYYKSNNVEFAVNTEGVYSEPRPIGTRYLTRNL

SEQ ID NO: 34 - protein, 743 aa, Adeno-Associated Virus 9
MAADGYLPDWLEDNLSEGIREWWALKPGAPQPKANQQHQDNARGLVLPGYKYLGPGNGLDKGEPVNAADAAALEHDKAYDQQLKAGDNPYLKYNHADAEFQERLKEDTSFGGNLGRAVFQAKKRLLEPLGLVEEAAKTAPGKKRPVEQSPQEPDSSAGIGKSGAQPAKKRLNFGQTGDTESVPDPQPIGEPPAAPSGVGSLTMASGGGAPVADNNEGADGVGSSSGNWHCDSQWLGDRVITTSTRTWALPTYNNHLYKQISNSTSGGSSNDNAYFGYSTPWGYFDFNRFHCHFSPRDWQRLINNNWGFRPKRLNFKLFNIQVKEVTDNNGVKTIANNLTSTVQVFTDSDYQLPYVLGSAHEGCLPPFPADVFMIPQYGYLTLNDGSQAVGRSSFYCLEYFPSQMLRTGNNFQFSYEFENVPFHSSYAHSQSLDRLMNPLIDQYLYYLSRTINGSGQNQQTLKFSVAGPSNMAVQGRNYIPGPSYRQQRVSTTVTQNNNSEFAWPGASSWALNGRNSLMNPGPAMASHKEGEDRFFPLSGSLIFGKQGTGRDNVDADKVMITNEEEIKTTNPVATESYGQVATNHQSAQTARPNEYAQAQTGWVQNQGILPGMVWQDRDVYLQGPIWAKIPHTDGNFHPSPLMGGFGMKHPPPQILIKNTPVPADPPTAFNKDKLNSFITQYSTGQVSVEIEWELQKENSKRWNPEIQYTSNYYKSNNVEFAVNTEGVYSEPRPIGTRYLTRNL

SEQ ID NO: 35 - protein, 743 aa, Adeno-Associated Virus 9
MAADGYLPDWLEDNLSEGIREWWALKPGAPQPKANQQHQDNARGLVLPGYKYLGPGNGLDKGEPVNAADAAALEHDKAYDQQLKAGDNPYLKYNHADAEFQERLKEDTSFGGNLGRAVFQAKKRLLEPLGLVEEAAKTAPGKKRPVEQSPQEPDSSAGIGKSGAQPAKKRLNFGQTGDTESVPDPQPIGEPPAAPSGVGSLTMASGGGAPVADNNEGADGVGSSSGNWHCDSQWLGDRVITTSTRTWALPTYNNHLYKQISNSTSGGSSNDNAYFGYSTPWGYFDFNRFHCHFSPRDWQRLINNNWGFRPKRLNFKLFNIQVKEVTDNNGVKTIANNLTSTVQVFTDSDYQLPYVLGSAHEGCLPPFPADVFMIPQYGYLTLNDGSQAVGRSSFYCLEYFPSQMLRTGNNFQFSYEFENVPFHSSYAHSQSLDRLMNPLIDQYLYYLSRTINGSGQNQQTLKFSVAGPSNMAVQGRNYIPGPSYRQQRVSTTVTQNNNSEFAWPGASSWALNGRNSLMNPGPAMASHKEGEDRFFPLSGSLIFGKQGTGRDNVDADKVMITNEEEIKTTNPVATESYGQVATNHQSAQTRTPVEFAQAQTGWVQNQGILPGMVWQDRDVYLQGPIWAKIPHTDGNFHPSPLMGGFGMKHPPPQILIKNTPVPADPPTAFNKDKLNSFITQYSTGQVSVEIEWELQKENSKRWNPEIQYTSNYYKSNNVEFAVNTEGVYSEPRPIGTRYLTRNL

SEQ ID NO: 36 - protein, 743 aa, Adeno-Associated Virus 9
MAADGYLPDWLEDNLSEGIREWWALKPGAPQPKANQQHQDNARGLVLPGYKYLGPGNGLDKGEPVNAADAAALEHDKAYDQQLKAGDNPYLKYNHADAEFQERLKEDTSFGGNLGRAVFQAKKRLLEPLGLVEEAAKTAPGKKRPVEQSPQEPDSSAGIGKSGAQPAKKRLNFGQTGDTESVPDPQPIGEPPAAPSGVGSLTMASGGGAPVADNNEGADGVGSSSGNWHCDSQWLGDRVITTSTRTWALPTYNNHLYKQISNSTSGGSSNDNAYFGYSTPWGYFDFNRFHCHFSPRDWQRLINNNWGFRPKRLNFKLFNIQVKEVTDNNGVKTIANNLTSTVQVFTDSDYQLPYVLGSAHEGCLPPFPADVFMIPQYGYLTLNDGSQAVGRSSFYCLEYFPSQMLRTGNNFQFSYEFENVPFHSSYAHSQSLDRLMNPLIDQYLYYLSRTINGSGQNQQTLKFSVAGPSNMAVQGRNYIPGPSYRQQRVSTTVTQNNNSEFAWPGASSWALNGRNSLMNPGPAMASHKEGEDRFFPLSGSLIFGKQGTGRDNVDADKVMITNEEEIKTTNPVATESYGQVATNHQSAQENHTRDKAQAQTGWVQNQGILPGMVWQDRDVYLQGPIWAKIPHTDGNFHPSPLMGGFGMKHPPPQILIKNTPVPADPPTAFNKDKLNSFITQYSTGQVSVEIEWELQKENSKRWNPEIQYTSNYYKSNNVEFAVNTEGVYSEPRPIGTRYLTRNL

SEQ ID NO: 37 - protein, 743 aa, Adeno-Associated Virus 9
MAADGYLPDWLEDNLSEGIREWWALKPGAPQPKANQQHQDNARGLVLPGYKYLGPGNGLDKGEPVNAADAAALEHDKAYDQQLKAGDNPYLKYNHADAEFQERLKEDTSFGGNLGRAVFQAKKRLLEPLGLVEEAAKTAPGKKRPVEQSPQEPDSSAGIGKSGAQPAKKRLNFGQTGDTESVPDPQPIGEPPAAPSGVGSLTMASGGGAPVADNNEGADGVGSSSGNWHCDSQWLGDRVITTSTRTWALPTYNNHLYKQISNSTSGGSSNDNAYFGYSTPWGYFDFNRFHCHFSPRDWQRLINNNWGFRPKRLNFKLFNIQVKEVTDNNGVKTIANNLTSTVQVFTDSDYQLPYVLGSAHEGCLPPFPADVFMIPQYGYLTLNDGSQAVGRSSFYCLEYFPSQMLRTGNNFQFSYEFENVPFHSSYAHSQSLDRLMNPLIDQYLYYLSRTINGSGQNQQTLKFSVAGPSNMAVQGRNYIPGPSYRQQRVSTTVTQNNNSEFAWPGASSWALNGRNSLMNPGPAMASHKEGEDRFFPLSGSLIFGKQGTGRDNVDADKVMITNEEEIKTTNPVATESYGQVATNHQSAQGNDTRSTAQAQTGWVQNQGILPGMVWQDRDVYLQGPIWAKIPHTDGNFHPSPLMGGFGMKHPPPQILIKNTPVPADPPTAFNKDKLNSFITQYSTGQVSVEIEWELQKENSKRWNPEIQYTSNYYKSNNVEFAVNTEGVYSEPRPIGTRYLTRNL

SEQ ID NO: 38 - protein, 743 aa, Adeno-Associated Virus 9
MAADGYLPDWLEDNLSEGIREWWALKPGAPQPKANQQHQDNARGLVLPGYKYLGPGNGLDKGEPVNAADAAALEHDKAYDQQLKAGDNPYLKYNHADAEFQERLKEDTSFGGNLGRAVFQAKKRLLEPLGLVEEAAKTAPGKKRPVEQSPQEPDSSAGIGKSGAQPAKKRLNFGQTGDTESVPDPQPIGEPPAAPSGVGSLTMASGGGAPVADNNEGADGVGSSSGNWHCDSQWLGDRVITTSTRTWALPTYNNHLYKQISNSTSGGSSNDNAYFGYSTPWGYFDFNRFHCHFSPRDWQRLINNNWGFRPKRLNFKLFNIQVKEVTDNNGVKTIANNLTSTVQVFTDSDYQLPYVLGSAHEGCLPPFPADVFMIPQYGYLTLNDGSQAVGRSSFYCLEYFPSQMLRTGNNFQFSYEFENVPFHSSYAHSQSLDRLMNPLIDQYLYYLSRTINGSGQNQQTLKFSVAGPSNMAVQGRNYIPGPSYRQQRVSTTVTQNNNSEFAWPGASSWALNGRNSLMNPGPAMASHKEGEDRFFPLSGSLIFGKQGTGRDNVDADKVMITNEEEIKTTNPVATESYGQVATNHQSAQMNSTISKAQAQTGWVQNQGILPGMVWQDRDVYLQGPIWAKIPHTDGNFHPSPLMGGFGMKHPPPQILIKNTPVPADPPTAFNKDKLNSFITQYSTGQVSVEIEWELQKENSKRWNPEIQYTSNYYKSNNVEFAVNTEGVYSEPRPIGTRYLTRNL

SEQ ID NO: 39 - protein, 743 aa, Adeno-Associated Virus 9
MAADGYLPDWLEDNLSEGIREWWALKPGAPQPKANQQHQDNARGLVLPGYKYLGPGNGLDKGEPVNAADAAALEHDKAYDQQLKAGDNPYLKYNHADAEFQERLKEDTSFGGNLGRAVFQAKKRLLEPLGLVEEAAKTAPGKKRPVEQSPQEPDSSAGIGKSGAQPAKKRLNFGQTGDTESVPDPQPIGEPPAAPSGVGSLTMASGGGAPVADNNEGADGVGSSSGNWHCDSQWLGDRVITTSTRTWALPTYNNHLYKQISNSTSGGSSNDNAYFGYSTPWGYFDFNRFHCHFSPRDWQRLINNNWGFRPKRLNFKLFNIQVKEVTDNNGVKTIANNLTSTVQVFTDSDYQLPYVLGSAHEGCLPPFPADVFMIPQYGYLTLNDGSQAVGRSSFYCLEYFPSQMLRTGNNFQFSYEFENVPFHSSYAHSQSLDRLMNPLIDQYLYYLSRTINGSGQNQQTLKFSVAGPSNMAVQGRNYIPGPSYRQQRVSTTVTQNNNSEFAWPGASSWALNGRNSLMNPGPAMASHKEGEDRFFPLSGSLIFGKQGTGRDNVDADKVMITNEEEIKTTNPVATESYGQVATNHQSAQQSRDLYRAQAQTGWVQNQGILPGMVWQDRDVYLQGPIWAKIPHTDGNFHPSPLMGGFGMKHPPPQILIKNTPVPADPPTAFNKDKLNSFITQYSTGQVSVEIEWELQKENSKRWNPEIQYTSNYYKSNNVEFAVNTEGVYSEPRPIGTRYLTRNL

SEQ ID NO: 40 - protein, 743 aa, Adeno-Associated Virus 9
MAADGYLPDWLEDNLSEGIREWWALKPGAPQPKANQQHQDNARGLVLPGYKYLGPGNGLDKGEPVNAADAAALEHDKAYDQQLKAGDNPYLKYNHADAEFQERLKEDTSFGGNLGRAVFQAKKRLLEPLGLVEEAAKTAPGKKRPVEQSPQEPDSSAGIGKSGAQPAKKRLNFGQTGDTESVPDPQPIGEPPAAPSGVGSLTMASGGGAPVADNNEGADGVGSSSGNWHCDSQWLGDRVITTSTRTWALPTYNNHLYKQISNSTSGGSSNDNAYFGYSTPWGYFDFNRFHCHFSPRDWQRLINNNWGFRPKRLNFKLFNIQVKEVTDNNGVKTIANNLTSTVQVFTDSDYQLPYVLGSAHEGCLPPFPADVFMIPQYGYLTLNDGSQAVGRSSFYCLEYFPSQMLRTGNNFQFSYEFENVPFHSSYAHSQSLDRLMNPLIDQYLYYLSRTINGSGQNQQTLKFSVAGPSNMAVQGRNYIPGPSYRQQRVSTTVTQNNNSEFAWPGASSWALNGRNSLMNPGPAMASHKEGEDRFFPLSGSLIFGKQGTGRDNVDADKVMITNEEEIKTTNPVATESYGQVATNHQSAQVNTVREFAQAQTGWVQNQGILPGMVWQDRDVYLQGPIWAKIPHTDGNFHPSPLMGGFGMKHPPPQILIKNTPVPADPPTAFNKDKLNSFITQYSTGQVSVEIEWELQKENSKRWNPEIQYTSNYYKSNNVEFAVNTEGVYSEPRPIGTRYLTRNL

SEQ ID NO: 41 - DNA, 2229 bp, Adeno-Associated Virus 9
  source 1..2229: mol_type = other DNA
atggctgccgatggttatcttccagattggctcgaggacaaccttagtgaaggaattcgcgagtggtgggctttgaaacctggagcccctcaacccaaggcaaatcaacaacatcaagacaacgctcgaggtcttgtgcttccgggttacaaataccttggacccggcaacggactcgacaagggggagccggtcaacgcagcagacgcggcggccctcgagcacgacaaggcctacgaccagcagctcaaggccggagacaacccgtacctcaagtacaaccacgccgacgccgagttccaggagcggctcaaagaagatacgtcttttgggggcaacctcgggcgagcagtcttccaggccaaaaagaggcttcttgaacctcttggtctggttgaggaagcggctaagacggctcctggaaagaagaggcctgtagagcagtctcctcaggaaccggactcctccgcgggtattggcaaatcgggtgcacagcccgctaaaaagagactcaatttcggtcagactggcgacacagagtcagtcccagaccctcaaccaatcggagaacctcccgcagccccctcaggtgtgggatctcttacaatggcttcaggtggtggcgcaccagtggcagacaataacgaaggtgccgatggagtgggtagttcctcgggaaattggcattgcgattcccaatggctgggggacagagtcatcaccaccagcacccgaacctgggccctgcccacctacaacaatcacctctacaagcaaatctccaacagcacatctggaggatcttcaaatgacaacgcctacttcggctacagcaccccctgggggtattttgacttcaacagattccactgccacttctcaccacgtgactggcagcgactcatcaacaacaactggggattccggcctaagcgactcaacttcaagctcttcaacattcaggtcaaagaggttacggacaacaatggagtcaagaccatcgccaataaccttaccagcacggtccaggtcttcacggactcagactatcagctcccgtacgtgctcgggtcggctcacgagggctgcctcccgccgttcccagcggacgttttcatgattcctcagtacgggtatctgacgcttaatgatggaagccaggccgtgggtcgttcgtccttttactgcctggaatatttcccgtcgcaaatgctaagaacgggtaacaacttccagttcagctacgagtttgagaacgtacctttccatagcagctacgctcacagccaaagcctggaccgactaatgaatccactcatcgaccaatacttgtactatctctctagaactattaacggttctggacagaatcaacaaacgctaaaattcagtgtggccggacccagcaacatggctgtccagggaagaaactacatacctggacccagctaccgacaacaacgtgtctcaaccactgtgactcaaaacaacaacagcgaatttgcttggcctggagcttcttcttgggctctcaatggacgtaatagcttgatgaatcctggacctgctatggccagccacaaagaaggagaggaccgtttctttcctttgtctggatctttaatttttggcaaacaaggtaccggcagagacaacgtggatgcggacaaagtcatgataaccaacgaagaagaaattaaaactactaacccggtagcaacggagtcctatggacaagtggccacaaaccaccagagtgcccaagaattgaacccacgggagtttgcacaagcacaaaccggttgggttcaaaaccaaggaatacttccgggtatggtttggcaggacagagatgtgtacctgcaaggacccatttgggccaaaattcctcacacggacggcaactttcacccttctccgctgatgggagggtttggaatgaagcacccgcctcctcagatcctcatcaaaaacacacctgtacctgcggatcctccaacggccttcaacaaggacaagctgaactctttcatcacccagtattctactggccaagtcagcgtggagatcgagtgggagctgcagaaggaaaacagcaagcgctggaacccggagatccagtacacttccaactattacaagtctaataatgttgaatttgctgttaatactgaaggtgtatatagtgaaccccgccccattggcaccagatacctgactcgtaatctg

SEQ ID NO: 42 - DNA, 2229 bp, Adeno-Associated Virus 9
  source 1..2229: mol_type = other DNA
atggctgccgatggttatcttccagattggctcgaggacaaccttagtgaaggaattcgcgagtggtgggctttgaaacctggagcccctcaacccaaggcaaatcaacaacatcaagacaacgctcgaggtcttgtgcttccgggttacaaataccttggacccggcaacggactcgacaagggggagccggtcaacgcagcagacgcggcggccctcgagcacgacaaggcctacgaccagcagctcaaggccggagacaacccgtacctcaagtacaaccacgccgacgccgagttccaggagcggctcaaagaagatacgtcttttgggggcaacctcgggcgagcagtcttccaggccaaaaagaggcttcttgaacctcttggtctggttgaggaagcggctaagacggctcctggaaagaagaggcctgtagagcagtctcctcaggaaccggactcctccgcgggtattggcaaatcgggtgcacagcccgctaaaaagagactcaatttcggtcagactggcgacacagagtcagtcccagaccctcaaccaatcggagaacctcccgcagccccctcaggtgtgggatctcttacaatggcttcaggtggtggcgcaccagtggcagacaataacgaaggtgccgatggagtgggtagttcctcgggaaattggcattgcgattcccaatggctgggggacagagtcatcaccaccagcacccgaacctgggccctgcccacctacaacaatcacctctacaagcaaatctccaacagcacatctggaggatcttcaaatgacaacgcctacttcggctacagcaccccctgggggtattttgacttcaacagattccactgccacttctcaccacgtgactggcagcgactcatcaacaacaactggggattccggcctaagcgactcaacttcaagctcttcaacattcaggtcaaagaggttacggacaacaatggagtcaagaccatcgccaataaccttaccagcacggtccaggtcttcacggactcagactatcagctcccgtacgtgctcgggtcggctcacgagggctgcctcccgccgttcccagcggacgttttcatgattcctcagtacgggtatctgacgcttaatgatggaagccaggccgtgggtcgttcgtccttttactgcctggaatatttcccgtcgcaaatgctaagaacgggtaacaacttccagttcagctacgagtttgagaacgtacctttccatagcagctacgctcacagccaaagcctggaccgactaatgaatccactcatcgaccaatacttgtactatctctctagaactattaacggttctggacagaatcaacaaacgctaaaattcagtgtggccggacccagcaacatggctgtccagggaagaaactacatacctggacccagctaccgacaacaacgtgtctcaaccactgtgactcaaaacaacaacagcgaatttgcttggcctggagcttcttcttgggctctcaatggacgtaatagcttgatgaatcctggacctgctatggccagccacaaagaaggagaggaccgtttctttcctttgtctggatctttaatttttggcaaacaaggtaccggcagagacaacgtggatgcggacaaagtcatgataaccaacgaagaagaaattaaaactactaacccggtagcaacggagtcctatggacaagtggccacaaaccaccagagtgcgcaggagcttaatcctagagaattcgctcaggcgcagaccggttgggttcaaaaccaaggaatacttccgggtatggtttggcaggacagagatgtgtacctgcaaggacccatttgggccaaaattcctcacacggacggcaactttcacccttctccgctgatgggagggtttggaatgaagcacccgcctcctcagatcctcatcaaaaacacacctgtacctgcggatcctccaacggccttcaacaaggacaagctgaactctttcatcacccagtattctactggccaagtcagcgtggagatcgagtgggagctgcagaaggaaaacagcaagcgctggaacccggagatccagtacacttccaactattacaagtctaataatgttgaatttgctgttaatactgaaggtgtatatagtgaaccccgccccattggcaccagatacctgactcgtaatctg

SEQ ID NO: 43 - DNA, 2229 bp, Adeno-Associated Virus 9
  source 1..2229: mol_type = other DNA
atggctgccgatggttatcttccagattggctcgaggacaaccttagtgaaggaattcgcgagtggtgggctttgaaacctggagcccctcaacccaaggcaaatcaacaacatcaagacaacgctcgaggtcttgtgcttccgggttacaaataccttggacccggcaacggactcgacaagggggagccggtcaacgcagcagacgcggcggccctcgagcacgacaaggcctacgaccagcagctcaaggccggagacaacccgtacctcaagtacaaccacgccgacgccgagttccaggagcggctcaaagaagatacgtcttttgggggcaacctcgggcgagcagtcttccaggccaaaaagaggcttcttgaacctcttggtctggttgaggaagcggctaagacggctcctggaaagaagaggcctgtagagcagtctcctcaggaaccggactcctccgcgggtattggcaaatcgggtgcacagcccgctaaaaagagactcaatttcggtcagactggcgacacagagtcagtcccagaccctcaaccaatcggagaacctcccgcagccccctcaggtgtgggatctcttacaatggcttcaggtggtggcgcaccagtggcagacaataacgaaggtgccgatggagtgggtagttcctcgggaaattggcattgcgattcccaatggctgggggacagagtcatcaccaccagcacccgaacctgggccctgcccacctacaacaatcacctctacaagcaaatctccaacagcacatctggaggatcttcaaatgacaacgcctacttcggctacagcaccccctgggggtattttgacttcaacagattccactgccacttctcaccacgtgactggcagcgactcatcaacaacaactggggattccggcctaagcgactcaacttcaagctcttcaacattcaggtcaaagaggttacggacaacaatggagtcaagaccatcgccaataaccttaccagcacggtccaggtcttcacggactcagactatcagctcccgtacgtgctcgggtcggctcacgagggctgcctcccgccgttcccagcggacgttttcatgattcctcagtacgggtatctgacgcttaatgatggaagccaggccgtgggtcgttcgtccttttactgcctggaatatttcccgtcgcaaatgctaagaacgggtaacaacttccagttcagctacgagtttgagaacgtacctttccatagcagctacgctcacagccaaagcctggaccgactaatgaatccactcatcgaccaatacttgtactatctctctagaactattaacggttctggacagaatcaacaaacgctaaaattcagtgtggccggacccagcaacatggctgtccagggaagaaactacatacctggacccagctaccgacaacaacgtgtctcaaccactgtgactcaaaacaacaacagcgaatttgcttggcctggagcttcttcttgggctctcaatggacgtaatagcttgatgaatcctggacctgctatggccagccacaaagaaggagaggaccgtttctttcctttgtctggatctttaatttttggcaaacaaggtaccggcagagacaacgtggatgcggacaaagtcatgataaccaacgaagaagaaattaaaactactaacccggtagcaacggagtcctatggacaagtggccacaaaccaccagagtgcacaagagcttaatcctcgagaatttgctcaggcgcagaccggttgggttcaaaaccaaggaatacttccgggtatggtttggcaggacagagatgtgtacctgcaaggacccatttgggccaaaattcctcacacggacggcaactttcacccttctccgctgatgggagggtttggaatgaagcacccgcctcctcagatcctcatcaaaaacacacctgtacctgcggatcctccaacggccttcaacaaggacaagctgaactctttcatcacccagtattctactggccaagtcagcgtggagatcgagtgggagctgcagaaggaaaacagcaagcgctggaacccggagatccagtacacttccaactattacaagtctaataatgttgaatttgctgttaatactgaaggtgtatatagtgaaccccgccccattggcaccagatacctgactcgtaatctg

SEQ ID NO: 44 - DNA, 2229 bp, Adeno-Associated Virus 9
  source 1..2229: mol_type = other DNA
atggctgccgatggttatcttccagattggctcgaggacaaccttagtgaaggaattcgcgagtggtgggctttgaaacctggagcccctcaacccaaggcaaatcaacaacatcaagacaacgctcgaggtcttgtgcttccgggttacaaataccttggacccggcaacggactcgacaagggggagccggtcaacgcagcagacgcggcggccctcgagcacgacaaggcctacgaccagcagctcaaggccggagacaacccgtacctcaagtacaaccacgccgacgccgagttccaggagcggctcaaagaagatacgtcttttgggggcaacctcgggcgagcagtcttccaggccaaaaagaggcttcttgaacctcttggtctggttgaggaagcggctaagacggctcctggaaagaagaggcctgtagagcagtctcctcaggaaccggactcctccgcgggtattggcaaatcgggtgcacagcccgctaaaaagagactcaatttcggtcagactggcgacacagagtcagtcccagaccctcaaccaatcggagaacctcccgcagccccctcaggtgtgggatctcttacaatggcttcaggtggtggcgcaccagtggcagacaataacgaaggtgccgatggagtgggtagttcctcgggaaattggcattgcgattcccaatggctgggggacagagtcatcaccaccagcacccgaacctgggccctgcccacctacaacaatcacctctacaagcaaatctccaacagcacatctggaggatcttcaaatgacaacgcctacttcggctacagcaccccctgggggtattttgacttcaacagattccactgccacttctcaccacgtgactggcagcgactcatcaacaacaactggggattccggcctaagcgactcaacttcaagctcttcaacattcaggtcaaagaggttacggacaacaatggagtcaagaccatcgccaataaccttaccagcacggtccaggtcttcacggactcagactatcagctcccgtacgtgctcgggtcggctcacgagggctgcctcccgccgttcccagcggacgttttcatgattcctcagtacgggtatctgacgcttaatgatggaagccaggccgtgggtcgttcgtccttttactgcctggaatatttcccgtcgcaaatgctaagaacgggtaacaacttccagttcagctacgagtttgagaacgtacctttccatagcagctacgctcacagccaaagcctggaccgactaatgaatccactcatcgaccaatacttgtactatctctctagaactattaacggttctggacagaatcaacaaacgctaaaattcagtgtggccggacccagcaacatggctgtccagggaagaaactacatacctggacccagctaccgacaacaacgtgtctcaaccactgtgactcaaaacaacaacagcgaatttgcttggcctggagcttcttcttgggctctcaatggacgtaatagcttgatgaatcctggacctgctatggccagccacaaagaaggagaggaccgtttctttcctttgtctggatctttaatttttggcaaacaaggtaccggcagagacaacgtggatgcggacaaagtcatgataaccaacgaagaagaaattaaaactactaacccggtagcaacggagtcctatggacaagtggccacaaaccaccagagtgcccaggaattgaacccaagggagttcgctcaggctcagaccggttgggttcaaaaccaaggaatacttccgggtatggtttggcaggacagagatgtgtacctgcaaggacccatttgggccaaaattcctcacacggacggcaactttcacccttctccgctgatgggagggtttggaatgaagcacccgcctcctcagatcctcatcaaaaacacacctgtacctgcggatcctccaacggccttcaacaaggacaagctgaactctttcatcacccagtattctactggccaagtcagcgtggagatcgagtgggagctgcagaaggaaaacagcaagcgctggaacccggagatccagtacacttccaactattacaagtctaataatgttgaatttgctgttaatactgaaggtgtatatagtgaaccccgccccattggcaccagatacctgactcgtaatctg

SEQ ID NO: 45 - DNA, 2229 bp, Adeno-Associated Virus 9
  source 1..2229: mol_type = other DNA
atggctgccgatggttatcttccagattggctcgaggacaaccttagtgaaggaattcgcgagtggtgggctttgaaacctggagcccctcaacccaaggcaaatcaacaacatcaagacaacgctcgaggtcttgtgcttccgggttacaaataccttggacccggcaacggactcgacaagggggagccggtcaacgcagcagacgcggcggccctcgagcacgacaaggcctacgaccagcagctcaaggccggagacaacccgtacctcaagtacaaccacgccgacgccgagttccaggagcggctcaaagaagatacgtcttttgggggcaacctcgggcgagcagtcttccaggccaaaaagaggcttcttgaacctcttggtctggttgaggaagcggctaagacggctcctggaaagaagaggcctgtagagcagtctcctcaggaaccggactcctccgcgggtattggcaaatcgggtgcacagcccgctaaaaagagactcaatttcggtcagactggcgacacagagtcagtcccagaccctcaaccaatcggagaacctcccgcagccccctcaggtgtgggatctcttacaatggcttcaggtggtggcgcaccagtggcagacaataacgaaggtgccgatggagtgggtagttcctcgggaaattggcattgcgattcccaatggctgggggacagagtcatcaccaccagcacccgaacctgggccctgcccacctacaacaatcacctctacaagcaaatctccaacagcacatctggaggatcttcaaatgacaacgcctacttcggctacagcaccccctgggggtattttgacttcaacagattccactgccacttctcaccacgtgactggcagcgactcatcaacaacaactggggattccggcctaagcgactcaacttcaagctcttcaacattcaggtcaaagaggttacggacaacaatggagtcaagaccatcgccaataaccttaccagcacggtccaggtcttcacggactcagactatcagctcccgtacgtgctcgggtcggctcacgagggctgcctcccgccgttcccagcggacgttttcatgattcctcagtacgggtatctgacgcttaatgatggaagccaggccgtgggtcgttcgtccttttactgcctggaatatttcccgtcgcaaatgctaagaacgggtaacaacttccagttcagctacgagtttgagaacgtacctttccatagcagctacgctcacagccaaagcctggaccgactaatgaatccactcatcgaccaatacttgtactatctctctagaactattaacggttctggacagaatcaacaaacgctaaaattcagtgtggccggacccagcaacatggctgtccagggaagaaactacatacctggacccagctaccgacaacaacgtgtctcaaccactgtgactcaaaacaacaacagcgaatttgcttggcctggagcttcttcttgggctctcaatggacgtaatagcttgatgaatcctggacctgctatggccagccacaaagaaggagaggaccgtttctttcctttgtctggatctttaatttttggcaaacaaggtaccggcagagacaacgtggatgcggacaaagtcatgataaccaacgaagaagaaattaaaactactaacccggtagcaacggagtcctatggacaagtggccacaaaccaccagagtgcccaggagttaaacccccgagagttcgcacaagcccagaccggttgggttcaaaaccaaggaatacttccgggtatggtttggcaggacagagatgtgtacctgcaaggacccatttgggccaaaattcctcacacggacggcaactttcacccttctccgctgatgggagggtttggaatgaagcacccgcctcctcagatcctcatcaaaaacacacctgtacctgcggatcctccaacggccttcaacaaggacaagctgaactctttcatcacccagtattctactggccaagtcagcgtggagatcgagtgggagctgcagaaggaaaacagcaagcgctggaacccggagatccagtacacttccaactattacaagtctaataatgttgaatttgctgttaatactgaaggtgtatatagtgaaccccgccccattggcaccagatacctgactcgtaatctg

SEQ ID NO: 46 - DNA, 2229 bp, Adeno-Associated Virus 9
  source 1..2229: mol_type = other DNA
atggctgccgatggttatcttccagattggctcgaggacaaccttagtgaaggaattcgcgagtggtgggctttgaaacctggagcccctcaacccaaggcaaatcaacaacatcaagacaacgctcgaggtcttgtgcttccgggttacaaataccttggacccggcaacggactcgacaagggggagccggtcaacgcagcagacgcggcggccctcgagcacgacaaggcctacgaccagcagctcaaggccggagacaacccgtacctcaagtacaaccacgccgacgccgagttccaggagcggctcaaagaagatacgtcttttgggggcaacctcgggcgagcagtcttccaggccaaaaagaggcttcttgaacctcttggtctggttgaggaagcggctaagacggctcctggaaagaagaggcctgtagagcagtctcctcaggaaccggactcctccgcgggtattggcaaatcgggtgcacagcccgctaaaaagagactcaatttcggtcagactggcgacacagagtcagtcccagaccctcaaccaatcggagaacctcccgcagccccctcaggtgtgggatctcttacaatggcttcaggtggtggcgcaccagtggcagacaataacgaaggtgccgatggagtgggtagttcctcgggaaattggcattgcgattcccaatggctgggggacagagtcatcaccaccagcacccgaacctgggccctgcccacctacaacaatcacctctacaagcaaatctccaacagcacatctggaggatcttcaaatgacaacgcctacttcggctacagcaccccctgggggtattttgacttcaacagattccactgccacttctcaccacgtgactggcagcgactcatcaacaacaactggggattccggcctaagcgactcaacttcaagctcttcaacattcaggtcaaagaggttacggacaacaatggagtcaagaccatcgccaataaccttaccagcacggtccaggtcttcacggactcagactatcagctcccgtacgtgctcgggtcggctcacgagggctgcctcccgccgttcccagcggacgttttcatgattcctcagtacgggtatctgacgcttaatgatggaagccaggccgtgggtcgttcgtccttttactgcctggaatatttcccgtcgcaaatgctaagaacgggtaacaacttccagttcagctacgagtttgagaacgtacctttccatagcagctacgctcacagccaaagcctggaccgactaatgaatccactcatcgaccaatacttgtactatctctctagaactattaacggttctggacagaatcaacaaacgctaaaattcagtgtggccggacccagcaacatggctgtccagggaagaaactacatacctggacccagctaccgacaacaacgtgtctcaaccactgtgactcaaaacaacaacagcgaatttgcttggcctggagcttcttcttgggctctcaatggacgtaatagcttgatgaatcctggacctgctatggccagccacaaagaaggagaggaccgtttctttcctttgtctggatctttaatttttggcaaacaaggtaccggcagagacaacgtggatgcggacaaagtcatgataaccaacgaagaagaaattaaaactactaacccggtagcaacggagtcctatggacaagtggccacaaaccaccagagtgcacaagagttaaaccctcgcgaattcgcccaagctcagaccggttgggttcaaaaccaaggaatacttccgggtatggtttggcaggacagagatgtgtacctgcaaggacccatttgggccaaaattcctcacacggacggcaactttcacccttctccgctgatgggagggtttggaatgaagcacccgcctcctcagatcctcatcaaaaacacacctgtacctgcggatcctccaacggccttcaacaaggacaagctgaactctttcatcacccagtattctactggccaagtcagcgtggagatcgagtgggagctgcagaaggaaaacagcaagcgctggaacccggagatccagtacacttccaactattacaagtctaataatgttgaatttgctgttaatactgaaggtgtatatagtgaaccccgccccattggcaccagatacctgactcgtaatctg

SEQ ID NO: 47 - DNA, 2229 bp, Adeno-Associated Virus 9
  source 1..2229: mol_type = other DNA
atggctgccgatggttatcttccagattggctcgaggacaaccttagtgaaggaattcgcgagtggtgggctttgaaacctggagcccctcaacccaaggcaaatcaacaacatcaagacaacgctcgaggtcttgtgcttccgggttacaaataccttggacccggcaacggactcgacaagggggagccggtcaacgcagcagacgcggcggccctcgagcacgacaaggcctacgaccagcagctcaaggccggagacaacccgtacctcaagtacaaccacgccgacgccgagttccaggagcggctcaaagaagatacgtcttttgggggcaacctcgggcgagcagtcttccaggccaaaaagaggcttcttgaacctcttggtctggttgaggaagcggctaagacggctcctggaaagaagaggcctgtagagcagtctcctcaggaaccggactcctccgcgggtattggcaaatcgggtgcacagcccgctaaaaagagactcaatttcggtcagactggcgacacagagtcagtcccagaccctcaaccaatcggagaacctcccgcagccccctcaggtgtgggatctcttacaatggcttcaggtggtggcgcaccagtggcagacaataacgaaggtgccgatggagtgggtagttcctcgggaaattggcattgcgattcccaatggctgggggacagagtcatcaccaccagcacccgaacctgggccctgcccacctacaacaatcacctctacaagcaaatctccaacagcacatctggaggatcttcaaatgacaacgcctacttcggctacagcaccccctgggggtattttgacttcaacagattccactgccacttctcaccacgtgactggcagcgactcatcaacaacaactggggattccggcctaagcgactcaacttcaagctcttcaacattcaggtcaaagaggttacggacaacaatggagtcaagaccatcgccaataaccttaccagcacggtccaggtcttcacggactcagactatcagctcccgtacgtgctcgggtcggctcacgagggctgcctcccgccgttcccagcggacgttttcatgattcctcagtacgggtatctgacgcttaatgatggaagccaggccgtgggtcgttcgtccttttactgcctggaatatttcccgtcgcaaatgctaagaacgggtaacaacttccagttcagctacgagtttgagaacgtacctttccatagcagctacgctcacagccaaagcctggaccgactaatgaatccactcatcgaccaatacttgtactatctctctagaactattaacggttctggacagaatcaacaaacgctaaaattcagtgtggccggacccagcaacatggctgtccagggaagaaactacatacctggacccagctaccgacaacaacgtgtctcaaccactgtgactcaaaacaacaacagcgaatttgcttggcctggagcttcttcttgggctctcaatggacgtaatagcttgatgaatcctggacctgctatggccagccacaaagaaggagaggaccgtttctttcctttgtctggatctttaatttttggcaaacaaggtaccggcagagacaacgtggatgcggacaaagtcatgataaccaacgaagaagaaattaaaactactaacccggtagcaacggagtcctatggacaagtggccacaaaccaccagagtgcgcaggaattgaacccaagagagttcgcccaagcacaaaccggttgggttcaaaaccaaggaatacttccgggtatggtttggcaggacagagatgtgtacctgcaaggacccatttgggccaaaattcctcacacggacggcaactttcacccttctccgctgatgggagggtttggaatgaagcacccgcctcctcagatcctcatcaaaaacacacctgtacctgcggatcctccaacggccttcaacaaggacaagctgaactctttcatcacccagtattctactggccaagtcagcgtggagatcgagtgggagctgcagaaggaaaacagcaagcgctggaacccggagatccagtacacttccaactattacaagtctaataatgttgaatttgctgttaatactgaaggtgtatatagtgaaccccgccccattggcaccagatacctgactcgtaatctg

SEQ ID NO: 48 - DNA, 2229 bp, Adeno-Associated Virus 9
  source 1..2229: mol_type = other DNA
atggctgccgatggttatcttccagattggctcgaggacaaccttagtgaaggaattcgcgagtggtgggctttgaaacctggagcccctcaacccaaggcaaatcaacaacatcaagacaacgctcgaggtcttgtgcttccgggttacaaataccttggacccggcaacggactcgacaagggggagccggtcaacgcagcagacgcggcggccctcgagcacgacaaggcctacgaccagcagctcaaggccggagacaacccgtacctcaagtacaaccacgccgacgccgagttccaggagcggctcaaagaagatacgtcttttgggggcaacctcgggcgagcagtcttccaggccaaaaagaggcttcttgaacctcttggtctggttgaggaagcggctaagacggctcctggaaagaagaggcctgtagagcagtctcctcaggaaccggactcctccgcgggtattggcaaatcgggtgcacagcccgctaaaaagagactcaatttcggtcagactggcgacacagagtcagtcccagaccctcaaccaatcggagaacctcccgcagccccctcaggtgtgggatctcttacaatggcttcaggtggtggcgcaccagtggcagacaataacgaaggtgccgatggagtgggtagttcctcgggaaattggcattgcgattcccaatggctgggggacagagtcatcaccaccagcacccgaacctgggccctgcccacctacaacaatcacctctacaagcaaatctccaacagcacatctggaggatcttcaaatgacaacgcctacttcggctacagcaccccctgggggtattttgacttcaacagattccactgccacttctcaccacgtgactggcagcgactcatcaacaacaactggggattccggcctaagcgactcaacttcaagctcttcaacattcaggtcaaagaggttacggacaacaatggagtcaagaccatcgccaataaccttaccagcacggtccaggtcttcacggactcagactatcagctcccgtacgtgctcgggtcggctcacgagggctgcctcccgccgttcccagcggacgttttcatgattcctcagtacgggtatctgacgcttaatgatggaagccaggccgtgggtcgttcgtccttttactgcctggaatatttcccgtcgcaaatgctaagaacgggtaacaacttccagttcagctacgagtttgagaacgtacctttccatagcagctacgctcacagccaaagcctggaccgactaatgaatccactcatcgaccaatacttgtactatctctctagaactattaacggttctggacagaatcaacaaacgctaaaattcagtgtggccggacccagcaacatggctgtccagggaagaaactacatacctggacccagctaccgacaacaacgtgtctcaaccactgtgactcaaaacaacaacagcgaatttgcttggcctggagcttcttcttgggctctcaatggacgtaatagcttgatgaatcctggacctgctatggccagccacaaagaaggagaggaccgtttctttcctttgtctggatctttaatttttggcaaacaaggtaccggcagagacaacgtggatgcggacaaagtcatgataaccaacgaagaagaaattaaaactactaacccggtagcaacggagtcctatggacaagtggccacaaaccaccagagtgcacaagagctaaatccccgcgaatttgcacaagcccaaaccggttgggttcaaaaccaaggaatacttccgggtatggtttggcaggacagagatgtgtacctgcaaggacccatttgggccaaaattcctcacacggacggcaactttcacccttctccgctgatgggagggtttggaatgaagcacccgcctcctcagatcctcatcaaaaacacacctgtacctgcggatcctccaacggccttcaacaaggacaagctgaactctttcatcacccagtattctactggccaagtcagcgtggagatcgagtgggagctgcagaaggaaaacagcaagcgctggaacccggagatccagtacacttccaactattacaagtctaataatgttgaatttgctgttaatactgaaggtgtatatagtgaaccccgccccattggcaccagatacctgactcgtaatctg

SEQ ID NO: 49 - DNA, 2229 bp, Adeno-Associated Virus 9
  source 1..2229: mol_type = other DNA
atggctgccgatggttatcttccagattggctcgaggacaaccttagtgaaggaattcgcgagtggtgggctttgaaacctggagcccctcaacccaaggcaaatcaacaacatcaagacaacgctcgaggtcttgtgcttccgggttacaaataccttggacccggcaacggactcgacaagggggagccggtcaacgcagcagacgcggcggccctcgagcacgacaaggcctacgaccagcagctcaaggccggagacaacccgtacctcaagtacaaccacgccgacgccgagttccaggagcggctcaaagaagatacgtcttttgggggcaacctcgggcgagcagtcttccaggccaaaaagaggcttcttgaacctcttggtctggttgaggaagcggctaagacggctcctggaaagaagaggcctgtagagcagtctcctcaggaaccggactcctccgcgggtattggcaaatcgggtgcacagcccgctaaaaagagactcaatttcggtcagactggcgacacagagtcagtcccagaccctcaaccaatcggagaacctcccgcagccccctcaggtgtgggatctcttacaatggcttcaggtggtggcgcaccagtggcagacaataacgaaggtgccgatggagtgggtagttcctcgggaaattggcattgcgattcccaatggctgggggacagagtcatcaccaccagcacccgaacctgggccctgcccacctacaacaatcacctctacaagcaaatctccaacagcacatctggaggatcttcaaatgacaacgcctacttcggctacagcaccccctgggggtattttgacttcaacagattccactgccacttctcaccacgtgactggcagcgactcatcaacaacaactggggattccggcctaagcgactcaacttcaagctcttcaacattcaggtcaaagaggttacggacaacaatggagtcaagaccatcgccaataaccttaccagcacggtccaggtcttcacggactcagactatcagctcccgtacgtgctcgggtcggctcacgagggctgcctcccgccgttcccagcggacgttttcatgattcctcagtacgggtatctgacgcttaatgatggaagccaggccgtgggtcgttcgtccttttactgcctggaatatttcccgtcgcaaatgctaagaacgggtaacaacttccagttcagctacgagtttgagaacgtacctttccatagcagctacgctcacagccaaagcctggaccgactaatgaatccactcatcgaccaatacttgtactatctctctagaactattaacggttctggacagaatcaacaaacgctaaaattcagtgtggccggacccagcaacatggctgtccagggaagaaactacatacctggacccagctaccgacaacaacgtgtctcaaccactgtgactcaaaacaacaacagcgaatttgcttggcctggagcttcttcttgggctctcaatggacgtaatagcttgatgaatcctggacctgctatggccagccacaaagaaggagaggaccgtttctttcctttgtctggatctttaatttttggcaaacaaggtaccggcagagacaacgtggatgcggacaaagtcatgataaccaacgaagaagaaattaaaactactaacccggtagcaacggagtcctatggacaagtggccacaaaccaccagagtgcgcaagaactgaatcctagggaatttgcgcaggcacaaaccggttgggttcaaaaccaaggaatacttccgggtatggtttggcaggacagagatgtgtacctgcaaggacccatttgggccaaaattcctcacacggacggcaactttcacccttctccgctgatgggagggtttggaatgaagcacccgcctcctcagatcctcatcaaaaacacacctgtacctgcggatcctccaacggccttcaacaaggacaagctgaactctttcatcacccagtattctactggccaagtcagcgtggagatcgagtgggagctgcagaaggaaaacagcaagcgctggaacccggagatccagtacacttccaactattacaagtctaataatgttgaatttgctgttaatactgaaggtgtatatagtgaaccccgccccattggcaccagatacctgactcgtaatctg

SEQ ID NO: 50 - DNA, 2229 bp, Adeno-Associated Virus 9
  source 1..2229: mol_type = other DNA
atggctgccgatggttatcttccagattggctcgaggacaaccttagtgaaggaattcgcgagtggtgggctttgaaacctggagcccctcaacccaaggcaaatcaacaacatcaagacaacgctcgaggtcttgtgcttccgggttacaaataccttggacccggcaacggactcgacaagggggagccggtcaacgcagcagacgcggcggccctcgagcacgacaaggcctacgaccagcagctcaaggccggagacaacccgtacctcaagtacaaccacgccgacgccgagttccaggagcggctcaaagaagatacgtcttttgggggcaacctcgggcgagcagtcttccaggccaaaaagaggcttcttgaacctcttggtctggttgaggaagcggctaagacggctcctggaaagaagaggcctgtagagcagtctcctcaggaaccggactcctccgcgggtattggcaaatcgggtgcacagcccgctaaaaagagactcaatttcggtcagactggcgacacagagtcagtcccagaccctcaaccaatcggagaacctcccgcagccccctcaggtgtgggatctcttacaatggcttcaggtggtggcgcaccagtggcagacaataacgaaggtgccgatggagtgggtagttcctcgggaaattggcattgcgattcccaatggctgggggacagagtcatcaccaccagcacccgaacctgggccctgcccacctacaacaatcacctctacaagcaaatctccaacagcacatctggaggatcttcaaatgacaacgcctacttcggctacagcaccccctgggggtattttgacttcaacagattccactgccacttctcaccacgtgactggcagcgactcatcaacaacaactggggattccggcctaagcgactcaacttcaagctcttcaacattcaggtcaaagaggttacggacaacaatggagtcaagaccatcgccaataaccttaccagcacggtccaggtcttcacggactcagactatcagctcccgtacgtgctcgggtcggctcacgagggctgcctcccgccgttcccagcggacgttttcatgattcctcagtacgggtatctgacgcttaatgatggaagccaggccgtgggtcgttcgtccttttactgcctggaatatttcccgtcgcaaatgctaagaacgggtaacaacttccagttcagctacgagtttgagaacgtacctttccatagcagctacgctcacagccaaagcctggaccgactaatgaatccactcatcgaccaatacttgtactatctctctagaactattaacggttctggacagaatcaacaaacgctaaaattcagtgtggccggacccagcaacatggctgtccagggaagaaactacatacctggacccagctaccgacaacaacgtgtctcaaccactgtgactcaaaacaacaacagcgaatttgcttggcctggagcttcttcttgggctctcaatggacgtaatagcttgatgaatcctggacctgctatggccagccacaaagaaggagaggaccgtttctttcctttgtctggatctttaatttttggcaaacaaggtaccggcagagacaacgtggatgcggacaaagtcatgataaccaacgaagaagaaattaaaactactaacccggtagcaacggagtcctatggacaagtggccacaaaccaccagagtgctcaggaactcaatccacgagagtttgcgcaggcgcaaaccggttgggttcaaaaccaaggaatacttccgggtatggtttggcaggacagagatgtgtacctgcaaggacccatttgggccaaaattcctcacacggacggcaactttcacccttctccgctgatgggagggtttggaatgaagcacccgcctcctcagatcctcatcaaaaacacacctgtacctgcggatcctccaacggccttcaacaaggacaagctgaactctttcatcacccagtattctactggccaagtcagcgtggagatcgagtgggagctgcagaaggaaaacagcaagcgctggaacccggagatccagtacacttccaactattacaagtctaataatgttgaatttgctgttaatactgaaggtgtatatagtgaaccccgccccattggcaccagatacctgactcgtaatctg

SEQ ID NO: 51 - DNA, 2229 bp, Adeno-Associated Virus 9
  source 1..2229: mol_type = other DNA
atggctgccgatggttatcttccagattggctcgaggacaaccttagtgaaggaattcgcgagtggtgggctttgaaacctggagcccctcaacccaaggcaaatcaacaacatcaagacaacgctcgaggtcttgtgcttccgggttacaaataccttggacccggcaacggactcgacaagggggagccggtcaacgcagcagacgcggcggccctcgagcacgacaaggcctacgaccagcagctcaaggccggagacaacccgtacctcaagtacaaccacgccgacgccgagttccaggagcggctcaaagaagatacgtcttttgggggcaacctcgggcgagcagtcttccaggccaaaaagaggcttcttgaacctcttggtctggttgaggaagcggctaagacggctcctggaaagaagaggcctgtagagcagtctcctcaggaaccggactcctccgcgggtattggcaaatcgggtgcacagcccgctaaaaagagactcaatttcggtcagactggcgacacagagtcagtcccagaccctcaaccaatcggagaacctcccgcagccccctcaggtgtgggatctcttacaatggcttcaggtggtggcgcaccagtggcagacaataacgaaggtgccgatggagtgggtagttcctcgggaaattggcattgcgattcccaatggctgggggacagagtcatcaccaccagcacccgaacctgggccctgcccacctacaacaatcacctctacaagcaaatctccaacagcacatctggaggatcttcaaatgacaacgcctacttcggctacagcaccccctgggggtattttgacttcaacagattccactgccacttctcaccacgtgactggcagcgactcatcaacaacaactggggattccggcctaagcgactcaacttcaagctcttcaacattcaggtcaaagaggttacggacaacaatggagtcaagaccatcgccaataaccttaccagcacggtccaggtcttcacggactcagactatcagctcccgtacgtgctcgggtcggctcacgagggctgcctcccgccgttcccagcggacgttttcatgattcctcagtacgggtatctgacgcttaatgatggaagccaggccgtgggtcgttcgtccttttactgcctggaatatttcccgtcgcaaatgctaagaacgggtaacaacttccagttcagctacgagtttgagaacgtacctttccatagcagctacgctcacagccaaagcctggaccgactaatgaatccactcatcgaccaatacttgtactatctctctagaactattaacggttctggacagaatcaacaaacgctaaaattcagtgtggccggacccagcaacatggctgtccagggaagaaactacatacctggacccagctaccgacaacaacgtgtctcaaccactgtgactcaaaacaacaacagcgaatttgcttggcctggagcttcttcttgggctctcaatggacgtaatagcttgatgaatcctggacctgctatggccagccacaaagaaggagaggaccgtttctttcctttgtctggatctttaatttttggcaaacaaggtaccggcagagacaacgtggatgcggacaaagtcatgataaccaacgaagaagaaattaaaactactaacccggtagcaacggagtcctatggacaagtggccacaaaccaccagagtgctcaaggtaagctacccagggagttcgcacaagcgcagaccggttgggttcaaaaccaaggaatacttccgggtatggtttggcaggacagagatgtgtacctgcaaggacccatttgggccaaaattcctcacacggacggcaactttcacccttctccgctgatgggagggtttggaatgaagcacccgcctcctcagatcctcatcaaaaacacacctgtacctgcggatcctccaacggccttcaacaaggacaagctgaactctttcatcacccagtattctactggccaagtcagcgtggagatcgagtgggagctgcagaaggaaaacagcaagcgctggaacccggagatccagtacacttccaactattacaagtctaataatgttgaatttgctgttaatactgaaggtgtatatagtgaaccccgccccattggcaccagatacctgactcgtaatctg

SEQ ID NO: 52 - DNA, 2229 bp, Adeno-Associated Virus 9
  source 1..2229: mol_type = other DNA
atggctgccgatggttatcttccagattggctcgaggacaaccttagtgaaggaattcgcgagtggtgggctttgaaacctggagcccctcaacccaaggcaaatcaacaacatcaagacaacgctcgaggtcttgtgcttccgggttacaaataccttggacccggcaacggactcgacaagggggagccggtcaacgcagcagacgcggcggccctcgagcacgacaaggcctacgaccagcagctcaaggccggagacaacccgtacctcaagtacaaccacgccgacgccgagttccaggagcggctcaaagaagatacgtcttttgggggcaacctcgggcgagcagtcttccaggccaaaaagaggcttcttgaacctcttggtctggttgaggaagcggctaagacggctcctggaaagaagaggcctgtagagcagtctcctcaggaaccggactcctccgcgggtattggcaaatcgggtgcacagcccgctaaaaagagactcaatttcggtcagactggcgacacagagtcagtcccagaccctcaaccaatcggagaacctcccgcagccccctcaggtgtgggatctcttacaatggcttcaggtggtggcgcaccagtggcagacaataacgaaggtgccgatggagtgggtagttcctcgggaaattggcattgcgattcccaatggctgggggacagagtcatcaccaccagcacccgaacctgggccctgcccacctacaacaatcacctctacaagcaaatctccaacagcacatctggaggatcttcaaatgacaacgcctacttcggctacagcaccccctgggggtattttgacttcaacagattccactgccacttctcaccacgtgactggcagcgactcatcaacaacaactggggattccggcctaagcgactcaacttcaagctcttcaacattcaggtcaaagaggttacggacaacaatggagtcaagaccatcgccaataaccttaccagcacggtccaggtcttcacggactcagactatcagctcccgtacgtgctcgggtcggctcacgagggctgcctcccgccgttcccagcggacgttttcatgattcctcagtacgggtatctgacgcttaatgatggaagccaggccgtgggtcgttcgtccttttactgcctggaatatttcccgtcgcaaatgctaagaacgggtaacaacttccagttcagctacgagtttgagaacgtacctttccatagcagctacgctcacagccaaagcctggaccgactaatgaatccactcatcgaccaatacttgtactatctctctagaactattaacggttctggacagaatcaacaaacgctaaaattcagtgtggccggacccagcaacatggctgtccagggaagaaactacatacctggacccagctaccgacaacaacgtgtctcaaccactgtgactcaaaacaacaacagcgaatttgcttggcctggagcttcttcttgggctctcaatggacgtaatagcttgatgaatcctggacctgctatggccagccacaaagaaggagaggaccgtttctttcctttgtctggatctttaatttttggcaaacaaggtaccggcagagacaacgtggatgcggacaaagtcatgataaccaacgaagaagaaattaaaactactaacccggtagcaacggagtcctatggacaagtggccacaaaccaccagagtgcacaggggaaacttcccagggaattcgcccaggcccaaaccggttgggttcaaaaccaaggaatacttccgggtatggtttggcaggacagagatgtgtacctgcaaggacccatttgggccaaaattcctcacacggacggcaactttcacccttctccgctgatgggagggtttggaatgaagcacccgcctcctcagatcctcatcaaaaacacacctgtacctgcggatcctccaacggccttcaacaaggacaagctgaactctttcatcacccagtattctactggccaagtcagcgtggagatcgagtgggagctgcagaaggaaaacagcaagcgctggaacccggagatccagtacacttccaactattacaagtctaataatgttgaatttgctgttaatactgaaggtgtatatagtgaaccccgccccattggcaccagatacctgactcgtaatctg

SEQ ID NO: 53 - DNA, 2229 bp, Adeno-Associated Virus 9
  source 1..2229: mol_type = other DNA
atggctgccgatggttatcttccagattggctcgaggacaaccttagtgaaggaattcgcgagtggtgggctttgaaacctggagcccctcaacccaaggcaaatcaacaacatcaagacaacgctcgaggtcttgtgcttccgggttacaaataccttggacccggcaacggactcgacaagggggagccggtcaacgcagcagacgcggcggccctcgagcacgacaaggcctacgaccagcagctcaaggccggagacaacccgtacctcaagtacaaccacgccgacgccgagttccaggagcggctcaaagaagatacgtcttttgggggcaacctcgggcgagcagtcttccaggccaaaaagaggcttcttgaacctcttggtctggttgaggaagcggctaagacggctcctggaaagaagaggcctgtagagcagtctcctcaggaaccggactcctccgcgggtattggcaaatcgggtgcacagcccgctaaaaagagactcaatttcggtcagactggcgacacagagtcagtcccagaccctcaaccaatcggagaacctcccgcagccccctcaggtgtgggatctcttacaatggcttcaggtggtggcgcaccagtggcagacaataacgaaggtgccgatggagtgggtagttcctcgggaaattggcattgcgattcccaatggctgggggacagagtcatcaccaccagcacccgaacctgggccctgcccacctacaacaatcacctctacaagcaaatctccaacagcacatctggaggatcttcaaatgacaacgcctacttcggctacagcaccccctgggggtattttgacttcaacagattccactgccacttctcaccacgtgactggcagcgactcatcaacaacaactggggattccggcctaagcgactcaacttcaagctcttcaacattcaggtcaaagaggttacggacaacaatggagtcaagaccatcgccaataaccttaccagcacggtccaggtcttcacggactcagactatcagctcccgtacgtgctcgggtcggctcacgagggctgcctcccgccgttcccagcggacgttttcatgattcctcagtacgggtatctgacgcttaatgatggaagccaggccgtgggtcgttcgtccttttactgcctggaatatttcccgtcgcaaatgctaagaacgggtaacaacttccagttcagctacgagtttgagaacgtacctttccatagcagctacgctcacagccaaagcctggaccgactaatgaatccactcatcgaccaatacttgtactatctctctagaactattaacggttctggacagaatcaacaaacgctaaaattcagtgtggccggacccagcaacatggctgtccagggaagaaactacatacctggacccagctaccgacaacaacgtgtctcaaccactgtgactcaaaacaacaacagcgaatttgcttggcctggagcttcttcttgggctctcaatggacgtaatagcttgatgaatcctggacctgctatggccagccacaaagaaggagaggaccgtttctttcctttgtctggatctttaatttttggcaaacaaggtaccggcagagacaacgtggatgcggacaaagtcatgataaccaacgaagaagaaattaaaactactaacccggtagcaacggagtcctatggacaagtggccacaaaccaccagagtgcgcaaggtaagctgcctcgcgagtttgcacaagcacagaccggttgggttcaaaaccaaggaatacttccgggtatggtttggcaggacagagatgtgtacctgcaaggacccatttgggccaaaattcctcacacggacggcaactttcacccttctccgctgatgggagggtttggaatgaagcacccgcctcctcagatcctcatcaaaaacacacctgtacctgcggatcctccaacggccttcaacaaggacaagctgaactctttcatcacccagtattctactggccaagtcagcgtggagatcgagtgggagctgcagaaggaaaacagcaagcgctggaacccggagatccagtacacttccaactattacaagtctaataatgttgaatttgctgttaatactgaaggtgtatatagtgaaccccgccccattggcaccagatacctgactcgtaatctg

SEQ ID NO: 54 - DNA, 2229 bp, Adeno-Associated Virus 9
  source 1..2229: mol_type = other DNA
atggctgccgatggttatcttccagattggctcgaggacaaccttagtgaaggaattcgcgagtggtgggctttgaaacctggagcccctcaacccaaggcaaatcaacaacatcaagacaacgctcgaggtcttgtgcttccgggttacaaataccttggacccggcaacggactcgacaagggggagccggtcaacgcagcagacgcggcggccctcgagcacgacaaggcctacgaccagcagctcaaggccggagacaacccgtacctcaagtacaaccacgccgacgccgagttccaggagcggctcaaagaagatacgtcttttgggggcaacctcgggcgagcagtcttccaggccaaaaagaggcttcttgaacctcttggtctggttgaggaagcggctaagacggctcctggaaagaagaggcctgtagagcagtctcctcaggaaccggactcctccgcgggtattggcaaatcgggtgcacagcccgctaaaaagagactcaatttcggtcagactggcgacacagagtcagtcccagaccctcaaccaatcggagaacctcccgcagccccctcaggtgtgggatctcttacaatggcttcaggtggtggcgcaccagtggcagacaataacgaaggtgccgatggagtgggtagttcctcgggaaattggcattgcgattcccaatggctgggggacagagtcatcaccaccagcacccgaacctgggccctgcccacctacaacaatcacctctacaagcaaatctccaacagcacatctggaggatcttcaaatgacaacgcctacttcggctacagcaccccctgggggtattttgacttcaacagattccactgccacttctcaccacgtgactggcagcgactcatcaacaacaactggggattccggcctaagcgactcaacttcaagctcttcaacattcaggtcaaagaggttacggacaacaatggagtcaagaccatcgccaataaccttaccagcacggtccaggtcttcacggactcagactatcagctcccgtacgtgctcgggtcggctcacgagggctgcctcccgccgttcccagcggacgttttcatgattcctcagtacgggtatctgacgcttaatgatggaagccaggccgtgggtcgttcgtccttttactgcctggaatatttcccgtcgcaaatgctaagaacgggtaacaacttccagttcagctacgagtttgagaacgtacctttccatagcagctacgctcacagccaaagcctggaccgactaatgaatccactcatcgaccaatacttgtactatctctctagaactattaacggttctggacagaatcaacaaacgctaaaattcagtgtggccggacccagcaacatggctgtccagggaagaaactacatacctggacccagctaccgacaacaacgtgtctcaaccactgtgactcaaaacaacaacagcgaatttgcttggcctggagcttcttcttgggctctcaatggacgtaatagcttgatgaatcctggacctgctatggccagccacaaagaaggagaggaccgtttctttcctttgtctggatctttaatttttggcaaacaaggtaccggcagagacaacgtggatgcggacaaagtcatgataaccaacgaagaagaaattaaaactactaacccggtagcaacggagtcctatggacaagtggccacaaaccaccagagtgcgcaaggtaaactccctagagagttcgctcaagcacagaccggttgggttcaaaaccaaggaatacttccgggtatggtttggcaggacagagatgtgtacctgcaaggacccatttgggccaaaattcctcacacggacggcaactttcacccttctccgctgatgggagggtttggaatgaagcacccgcctcctcagatcctcatcaaaaacacacctgtacctgcggatcctccaacggccttcaacaaggacaagctgaactctttcatcacccagtattctactggccaagtcagcgtggagatcgagtgggagctgcagaaggaaaacagcaagcgctggaacccggagatccagtacacttccaactattacaagtctaataatgttgaatttgctgttaatactgaaggtgtatatagtgaaccccgccccattggcaccagatacctgactcgtaatctg

SEQ ID NO: 55 - DNA, 2229 bp, Adeno-Associated Virus 9
  source 1..2229: mol_type = other DNA
atggctgccgatggttatcttccagattggctcgaggacaaccttagtgaaggaattcgcgagtggtgggctttgaaacctggagcccctcaacccaaggcaaatcaacaacatcaagacaacgctcgaggtcttgtgcttccgggttacaaataccttggacccggcaacggactcgacaagggggagccggtcaacgcagcagacgcggcggccctcgagcacgacaaggcctacgaccagcagctcaaggccggagacaacccgtacctcaagtacaaccacgccgacgccgagttccaggagcggctcaaagaagatacgtcttttgggggcaacctcgggcgagcagtcttccaggccaaaaagaggcttcttgaacctcttggtctggttgaggaagcggctaagacggctcctggaaagaagaggcctgtagagcagtctcctcaggaaccggactcctccgcgggtattggcaaatcgggtgcacagcccgctaaaaagagactcaatttcggtcagactggcgacacagagtcagtcccagaccctcaaccaatcggagaacctcccgcagccccctcaggtgtgggatctcttacaatggcttcaggtggtggcgcaccagtggcagacaataacgaaggtgccgatggagtgggtagttcctcgggaaattggcattgcgattcccaatggctgggggacagagtcatcaccaccagcacccgaacctgggccctgcccacctacaacaatcacctctacaagcaaatctccaacagcacatctggaggatcttcaaatgacaacgcctacttcggctacagcaccccctgggggtattttgacttcaacagattccactgccacttctcaccacgtgactggcagcgactcatcaacaacaactggggattccggcctaagcgactcaacttcaagctcttcaacattcaggtcaaagaggttacggacaacaatggagtcaagaccatcgccaataaccttaccagcacggtccaggtcttcacggactcagactatcagctcccgtacgtgctcgggtcggctcacgagggctgcctcccgccgttcccagcggacgttttcatgattcctcagtacgggtatctgacgcttaatgatggaagccaggccgtgggtcgttcgtccttttactgcctggaatatttcccgtcgcaaatgctaagaacgggtaacaacttccagttcagctacgagtttgagaacgtacctttccatagcagctacgctcacagccaaagcctggaccgactaatgaatccactcatcgaccaatacttgtactatctctctagaactattaacggttctggacagaatcaacaaacgctaaaattcagtgtggccggacccagcaacatggctgtccagggaagaaactacatacctggacccagctaccgacaacaacgtgtctcaaccactgtgactcaaaacaacaacagcgaatttgcttggcctggagcttcttcttgggctctcaatggacgtaatagcttgatgaatcctggacctgctatggccagccacaaagaaggagaggaccgtttctttcctttgtctggatctttaatttttggcaaacaaggtaccggcagagacaacgtggatgcggacaaagtcatgataaccaacgaagaagaaattaaaactactaacccggtagcaacggagtcctatggacaagtggccacaaaccaccagagtgcgcaggggaaacttcctcgggaatttgcgcaggctcaaaccggttgggttcaaaaccaaggaatacttccgggtatggtttggcaggacagagatgtgtacctgcaaggacccatttgggccaaaattcctcacacggacggcaactttcacccttctccgctgatgggagggtttggaatgaagcacccgcctcctcagatcctcatcaaaaacacacctgtacctgcggatcctccaacggccttcaacaaggacaagctgaactctttcatcacccagtattctactggccaagtcagcgtggagatcgagtgggagctgcagaaggaaaacagcaagcgctggaacccggagatccagtacacttccaactattacaagtctaataatgttgaatttgctgttaatactgaaggtgtatatagtgaaccccgccccattggcaccagatacctgactcgtaatctg

SEQ ID NO: 56 - DNA, 2229 bp, Adeno-Associated Virus 9
  source 1..2229: mol_type = other DNA
atggctgccgatggttatcttccagattggctcgaggacaaccttagtgaaggaattcgcgagtggtgggctttgaaacctggagcccctcaacccaaggcaaatcaacaacatcaagacaacgctcgaggtcttgtgcttccgggttacaaataccttggacccggcaacggactcgacaagggggagccggtcaacgcagcagacgcggcggccctcgagcacgacaaggcctacgaccagcagctcaaggccggagacaacccgtacctcaagtacaaccacgccgacgccgagttccaggagcggctcaaagaagatacgtcttttgggggcaacctcgggcgagcagtcttccaggccaaaaagaggcttcttgaacctcttggtctggttgaggaagcggctaagacggctcctggaaagaagaggcctgtagagcagtctcctcaggaaccggactcctccgcgggtattggcaaatcgggtgcacagcccgctaaaaagagactcaatttcggtcagactggcgacacagagtcagtcccagaccctcaaccaatcggagaacctcccgcagccccctcaggtgtgggatctcttacaatggcttcaggtggtggcgcaccagtggcagacaataacgaaggtgccgatggagtgggtagttcctcgggaaattggcattgcgattcccaatggctgggggacagagtcatcaccaccagcacccgaacctgggccctgcccacctacaacaatcacctctacaagcaaatctccaacagcacatctggaggatcttcaaatgacaacgcctacttcggctacagcaccccctgggggtattttgacttcaacagattccactgccacttctcaccacgtgactggcagcgactcatcaacaacaactggggattccggcctaagcgactcaacttcaagctcttcaacattcaggtcaaagaggttacggacaacaatggagtcaagaccatcgccaataaccttaccagcacggtccaggtcttcacggactcagactatcagctcccgtacgtgctcgggtcggctcacgagggctgcctcccgccgttcccagcggacgttttcatgattcctcagtacgggtatctgacgcttaatgatggaagccaggccgtgggtcgttcgtccttttactgcctggaatatttcccgtcgcaaatgctaagaacgggtaacaacttccagttcagctacgagtttgagaacgtacctttccatagcagctacgctcacagccaaagcctggaccgactaatgaatccactcatcgaccaatacttgtactatctctctagaactattaacggttctggacagaatcaacaaacgctaaaattcagtgtggccggacccagcaacatggctgtccagggaagaaactacatacctggacccagctaccgacaacaacgtgtctcaaccactgtgactcaaaacaacaacagcgaatttgcttggcctggagcttcttcttgggctctcaatggacgtaatagcttgatgaatcctggacctgctatggccagccacaaagaaggagaggaccgtttctttcctttgtctggatctttaatttttggcaaacaaggtaccggcagagacaacgtggatgcggacaaagtcatgataaccaacgaagaagaaattaaaactactaacccggtagcaacggagtcctatggacaagtggccacaaaccaccagagtgcacaaggcaagttgcctagagaatttgcgcaggcacagaccggttgggttcaaaaccaaggaatacttccgggtatggtttggcaggacagagatgtgtacctgcaaggacccatttgggccaaaattcctcacacggacggcaactttcacccttctccgctgatgggagggtttggaatgaagcacccgcctcctcagatcctcatcaaaaacacacctgtacctgcggatcctccaacggccttcaacaaggacaagctgaactctttcatcacccagtattctactggccaagtcagcgtggagatcgagtgggagctgcagaaggaaaacagcaagcgctggaacccggagatccagtacacttccaactattacaagtctaataatgttgaatttgctgttaatactgaaggtgtatatagtgaaccccgccccattggcaccagatacctgactcgtaatctg

SEQ ID NO: 57 - DNA, 2229 bp, Adeno-Associated Virus 9
  source 1..2229: mol_type = other DNA
atggctgccgatggttatcttccagattggctcgaggacaaccttagtgaaggaattcgcgagtggtgggctttgaaacctggagcccctcaacccaaggcaaatcaacaacatcaagacaacgctcgaggtcttgtgcttccgggttacaaataccttggacccggcaacggactcgacaagggggagccggtcaacgcagcagacgcggcggccctcgagcacgacaaggcctacgaccagcagctcaaggccggagacaacccgtacctcaagtacaaccacgccgacgccgagttccaggagcggctcaaagaagatacgtcttttgggggcaacctcgggcgagcagtcttccaggccaaaaagaggcttcttgaacctcttggtctggttgaggaagcggctaagacggctcctggaaagaagaggcctgtagagcagtctcctcaggaaccggactcctccgcgggtattggcaaatcgggtgcacagcccgctaaaaagagactcaatttcggtcagactggcgacacagagtcagtcccagaccctcaaccaatcggagaacctcccgcagccccctcaggtgtgggatctcttacaatggcttcaggtggtggcgcaccagtggcagacaataacgaaggtgccgatggagtgggtagttcctcgggaaattggcattgcgattcccaatggctgggggacagagtcatcaccaccagcacccgaacctgggccctgcccacctacaacaatcacctctacaagcaaatctccaacagcacatctggaggatcttcaaatgacaacgcctacttcggctacagcaccccctgggggtattttgacttcaacagattccactgccacttctcaccacgtgactggcagcgactcatcaacaacaactggggattccggcctaagcgactcaacttcaagctcttcaacattcaggtcaaagaggttacggacaacaatggagtcaagaccatcgccaataaccttaccagcacggtccaggtcttcacggactcagactatcagctcccgtacgtgctcgggtcggctcacgagggctgcctcccgccgttcccagcggacgttttcatgattcctcagtacgggtatctgacgcttaatgatggaagccaggccgtgggtcgttcgtccttttactgcctggaatatttcccgtcgcaaatgctaagaacgggtaacaacttccagttcagctacgagtttgagaacgtacctttccatagcagctacgctcacagccaaagcctggaccgactaatgaatccactcatcgaccaatacttgtactatctctctagaactattaacggttctggacagaatcaacaaacgctaaaattcagtgtggccggacccagcaacatggctgtccagggaagaaactacatacctggacccagctaccgacaacaacgtgtctcaaccactgtgactcaaaacaacaacagcgaatttgcttggcctggagcttcttcttgggctctcaatggacgtaatagcttgatgaatcctggacctgctatggccagccacaaagaaggagaggaccgtttctttcctttgtctggatctttaatttttggcaaacaaggtaccggcagagacaacgtggatgcggacaaagtcatgataaccaacgaagaagaaattaaaactactaacccggtagcaacggagtcctatggacaagtggccacaaaccaccagagtgctcaagggaaacttcctcgtgagtttgcccaagctcagaccggttgggttcaaaaccaaggaatacttccgggtatggtttggcaggacagagatgtgtacctgcaaggacccatttgggccaaaattcctcacacggacggcaactttcacccttctccgctgatgggagggtttggaatgaagcacccgcctcctcagatcctcatcaaaaacacacctgtacctgcggatcctccaacggccttcaacaaggacaagctgaactctttcatcacccagtattctactggccaagtcagcgtggagatcgagtgggagctgcagaaggaaaacagcaagcgctggaacccggagatccagtacacttccaactattacaagtctaataatgttgaatttgctgttaatactgaaggtgtatatagtgaaccccgccccattggcaccagatacctgactcgtaatctg

SEQ ID NO: 58 - DNA, 2229 bp, Adeno-Associated Virus 9
  source 1..2229: mol_type = other DNA
atggctgccgatggttatcttccagattggctcgaggacaaccttagtgaaggaattcgcgagtggtgggctttgaaacctggagcccctcaacccaaggcaaatcaacaacatcaagacaacgctcgaggtcttgtgcttccgggttacaaataccttggacccggcaacggactcgacaagggggagccggtcaacgcagcagacgcggcggccctcgagcacgacaaggcctacgaccagcagctcaaggccggagacaacccgtacctcaagtacaaccacgccgacgccgagttccaggagcggctcaaagaagatacgtcttttgggggcaacctcgggcgagcagtcttccaggccaaaaagaggcttcttgaacctcttggtctggttgaggaagcggctaagacggctcctggaaagaagaggcctgtagagcagtctcctcaggaaccggactcctccgcgggtattggcaaatcgggtgcacagcccgctaaaaagagactcaatttcggtcagactggcgacacagagtcagtcccagaccctcaaccaatcggagaacctcccgcagccccctcaggtgtgggatctcttacaatggcttcaggtggtggcgcaccagtggcagacaataacgaaggtgccgatggagtgggtagttcctcgggaaattggcattgcgattcccaatggctgggggacagagtcatcaccaccagcacccgaacctgggccctgcccacctacaacaatcacctctacaagcaaatctccaacagcacatctggaggatcttcaaatgacaacgcctacttcggctacagcaccccctgggggtattttgacttcaacagattccactgccacttctcaccacgtgactggcagcgactcatcaacaacaactggggattccggcctaagcgactcaacttcaagctcttcaacattcaggtcaaagaggttacggacaacaatggagtcaagaccatcgccaataaccttaccagcacggtccaggtcttcacggactcagactatcagctcccgtacgtgctcgggtcggctcacgagggctgcctcccgccgttcccagcggacgttttcatgattcctcagtacgggtatctgacgcttaatgatggaagccaggccgtgggtcgttcgtccttttactgcctggaatatttcccgtcgcaaatgctaagaacgggtaacaacttccagttcagctacgagtttgagaacgtacctttccatagcagctacgctcacagccaaagcctggaccgactaatgaatccactcatcgaccaatacttgtactatctctctagaactattaacggttctggacagaatcaacaaacgctaaaattcagtgtggccggacccagcaacatggctgtccagggaagaaactacatacctggacccagctaccgacaacaacgtgtctcaaccactgtgactcaaaacaacaacagcgaatttgcttggcctggagcttcttcttgggctctcaatggacgtaatagcttgatgaatcctggacctgctatggccagccacaaagaaggagaggaccgtttctttcctttgtctggatctttaatttttggcaaacaaggtaccggcagagacaacgtggatgcggacaaagtcatgataaccaacgaagaagaaattaaaactactaacccggtagcaacggagtcctatggacaagtggccacaaaccaccagagtgcgcagggaaagctcccccgcgaattcgctcaggcacaaaccggttgggttcaaaaccaaggaatacttccgggtatggtttggcaggacagagatgtgtacctgcaaggacccatttgggccaaaattcctcacacggacggcaactttcacccttctccgctgatgggagggtttggaatgaagcacccgcctcctcagatcctcatcaaaaacacacctgtacctgcggatcctccaacggccttcaacaaggacaagctgaactctttcatcacccagtattctactggccaagtcagcgtggagatcgagtgggagctgcagaaggaaaacagcaagcgctggaacccggagatccagtacacttccaactattacaagtctaataatgttgaatttgctgttaatactgaaggtgtatatagtgaaccccgccccattggcaccagatacctgactcgtaatctg

SEQ ID NO: 59 - DNA, 2229 bp, Adeno-Associated Virus 9
  source 1..2229: mol_type = other DNA
atggctgccgatggttatcttccagattggctcgaggacaaccttagtgaaggaattcgcgagtggtgggctttgaaacctggagcccctcaacccaaggcaaatcaacaacatcaagacaacgctcgaggtcttgtgcttccgggttacaaataccttggacccggcaacggactcgacaagggggagccggtcaacgcagcagacgcggcggccctcgagcacgacaaggcctacgaccagcagctcaaggccggagacaacccgtacctcaagtacaaccacgccgacgccgagttccaggagcggctcaaagaagatacgtcttttgggggcaacctcgggcgagcagtcttccaggccaaaaagaggcttcttgaacctcttggtctggttgaggaagcggctaagacggctcctggaaagaagaggcctgtagagcagtctcctcaggaaccggactcctccgcgggtattggcaaatcgggtgcacagcccgctaaaaagagactcaatttcggtcagactggcgacacagagtcagtcccagaccctcaaccaatcggagaacctcccgcagccccctcaggtgtgggatctcttacaatggcttcaggtggtggcgcaccagtggcagacaataacgaaggtgccgatggagtgggtagttcctcgggaaattggcattgcgattcccaatggctgggggacagagtcatcaccaccagcacccgaacctgggccctgcccacctacaacaatcacctctacaagcaaatctccaacagcacatctggaggatcttcaaatgacaacgcctacttcggctacagcaccccctgggggtattttgacttcaacagattccactgccacttctcaccacgtgactggcagcgactcatcaacaacaactggggattccggcctaagcgactcaacttcaagctcttcaacattcaggtcaaagaggttacggacaacaatggagtcaagaccatcgccaataaccttaccagcacggtccaggtcttcacggactcagactatcagctcccgtacgtgctcgggtcggctcacgagggctgcctcccgccgttcccagcggacgttttcatgattcctcagtacgggtatctgacgcttaatgatggaagccaggccgtgggtcgttcgtccttttactgcctggaatatttcccgtcgcaaatgctaagaacgggtaacaacttccagttcagctacgagtttgagaacgtacctttccatagcagctacgctcacagccaaagcctggaccgactaatgaatccactcatcgaccaatacttgtactatctctctagaactattaacggttctggacagaatcaacaaacgctaaaattcagtgtggccggacccagcaacatggctgtccagggaagaaactacatacctggacccagctaccgacaacaacgtgtctcaaccactgtgactcaaaacaacaacagcgaatttgcttggcctggagcttcttcttgggctctcaatggacgtaatagcttgatgaatcctggacctgctatggccagccacaaagaaggagaggaccgtttctttcctttgtctggatctttaatttttggcaaacaaggtaccggcagagacaacgtggatgcggacaaagtcatgataaccaacgaagaagaaattaaaactactaacccggtagcaacggagtcctatggacaagtggccacaaaccaccagagtgcgcagggtaaactgccccgagagttcgctcaagctcaaaccggttgggttcaaaaccaaggaatacttccgggtatggtttggcaggacagagatgtgtacctgcaaggacccatttgggccaaaattcctcacacggacggcaactttcacccttctccgctgatgggagggtttggaatgaagcacccgcctcctcagatcctcatcaaaaacacacctgtacctgcggatcctccaacggccttcaacaaggacaagctgaactctttcatcacccagtattctactggccaagtcagcgtggagatcgagtgggagctgcagaaggaaaacagcaagcgctggaacccggagatccagtacacttccaactattacaagtctaataatgttgaatttgctgttaatactgaaggtgtatatagtgaaccccgccccattggcaccagatacctgactcgtaatctg

SEQ ID NO: 60 - DNA, 2229 bp, Adeno-Associated Virus 9
  source 1..2229: mol_type = other DNA
atggctgccgatggttatcttccagattggctcgaggacaaccttagtgaaggaattcgcgagtggtgggctttgaaacctggagcccctcaacccaaggcaaatcaacaacatcaagacaacgctcgaggtcttgtgcttccgggttacaaataccttggacccggcaacggactcgacaagggggagccggtcaacgcagcagacgcggcggccctcgagcacgacaaggcctacgaccagcagctcaaggccggagacaacccgtacctcaagtacaaccacgccgacgccgagttccaggagcggctcaaagaagatacgtcttttgggggcaacctcgggcgagcagtcttccaggccaaaaagaggcttcttgaacctcttggtctggttgaggaagcggctaagacggctcctggaaagaagaggcctgtagagcagtctcctcaggaaccggactcctccgcgggtattggcaaatcgggtgcacagcccgctaaaaagagactcaatttcggtcagactggcgacacagagtcagtcccagaccctcaaccaatcggagaacctcccgcagccccctcaggtgtgggatctcttacaatggcttcaggtggtggcgcaccagtggcagacaataacgaaggtgccgatggagtgggtagttcctcgggaaattggcattgcgattcccaatggctgggggacagagtcatcaccaccagcacccgaacctgggccctgcccacctacaacaatcacctctacaagcaaatctccaacagcacatctggaggatcttcaaatgacaacgcctacttcggctacagcaccccctgggggtattttgacttcaacagattccactgccacttctcaccacgtgactggcagcgactcatcaacaacaactggggattccggcctaagcgactcaacttcaagctcttcaacattcaggtcaaagaggttacggacaacaatggagtcaagaccatcgccaataaccttaccagcacggtccaggtcttcacggactcagactatcagctcccgtacgtgctcgggtcggctcacgagggctgcctcccgccgttcccagcggacgttttcatgattcctcagtacgggtatctgacgcttaatgatggaagccaggccgtgggtcgttcgtccttttactgcctggaatatttcccgtcgcaaatgctaagaacgggtaacaacttccagttcagctacgagtttgagaacgtacctttccatagcagctacgctcacagccaaagcctggaccgactaatgaatccactcatcgaccaatacttgtactatctctctagaactattaacggttctggacagaatcaacaaacgctaaaattcagtgtggccggacccagcaacatggctgtccagggaagaaactacatacctggacccagctaccgacaacaacgtgtctcaaccactgtgactcaaaacaacaacagcgaatttgcttggcctggagcttcttcttgggctctcaatggacgtaatagcttgatgaatcctggacctgctatggccagccacaaagaaggagaggaccgtttctttcctttgtctggatctttaatttttggcaaacaaggtaccggcagagacaacgtggatgcggacaaagtcatgataaccaacgaagaagaaattaaaactactaacccggtagcaacggagtcctatggacaagtggccacaaaccaccagagtgcccagggaaagctgccgcgcgaatttgcccaggcgcaaaccggttgggttcaaaaccaaggaatacttccgggtatggtttggcaggacagagatgtgtacctgcaaggacccatttgggccaaaattcctcacacggacggcaactttcacccttctccgctgatgggagggtttggaatgaagcacccgcctcctcagatcctcatcaaaaacacacctgtacctgcggatcctccaacggccttcaacaaggacaagctgaactctttcatcacccagtattctactggccaagtcagcgtggagatcgagtgggagctgcagaaggaaaacagcaagcgctggaacccggagatccagtacacttccaactattacaagtctaataatgttgaatttgctgttaatactgaaggtgtatatagtgaaccccgccccattggcaccagatacctgactcgtaatctg

SEQ ID NO: 61 - DNA, 2229 bp, Adeno-Associated Virus 9
  source 1..2229: mol_type = other DNA
atggctgccgatggttatcttccagattggctcgaggacaaccttagtgaaggaattcgcgagtggtgggctttgaaacctggagcccctcaacccaaggcaaatcaacaacatcaagacaacgctcgaggtcttgtgcttccgggttacaaataccttggacccggcaacggactcgacaagggggagccggtcaacgcagcagacgcggcggccctcgagcacgacaaggcctacgaccagcagctcaaggccggagacaacccgtacctcaagtacaaccacgccgacgccgagttccaggagcggctcaaagaagatacgtcttttgggggcaacctcgggcgagcagtcttccaggccaaaaagaggcttcttgaacctcttggtctggttgaggaagcggctaagacggctcctggaaagaagaggcctgtagagcagtctcctcaggaaccggactcctccgcgggtattggcaaatcgggtgcacagcccgctaaaaagagactcaatttcggtcagactggcgacacagagtcagtcccagaccctcaaccaatcggagaacctcccgcagccccctcaggtgtgggatctcttacaatggcttcaggtggtggcgcaccagtggcagacaataacgaaggtgccgatggagtgggtagttcctcgggaaattggcattgcgattcccaatggctgggggacagagtcatcaccaccagcacccgaacctgggccctgcccacctacaacaatcacctctacaagcaaatctccaacagcacatctggaggatcttcaaatgacaacgcctacttcggctacagcaccccctgggggtattttgacttcaacagattccactgccacttctcaccacgtgactggcagcgactcatcaacaacaactggggattccggcctaagcgactcaacttcaagctcttcaacattcaggtcaaagaggttacggacaacaatggagtcaagaccatcgccaataaccttaccagcacggtccaggtcttcacggactcagactatcagctcccgtacgtgctcgggtcggctcacgagggctgcctcccgccgttcccagcggacgttttcatgattcctcagtacgggtatctgacgcttaatgatggaagccaggccgtgggtcgttcgtccttttactgcctggaatatttcccgtcgcaaatgctaagaacgggtaacaacttccagttcagctacgagtttgagaacgtacctttccatagcagctacgctcacagccaaagcctggaccgactaatgaatccactcatcgaccaatacttgtactatctctctagaactattaacggttctggacagaatcaacaaacgctaaaattcagtgtggccggacccagcaacatggctgtccagggaagaaactacatacctggacccagctaccgacaacaacgtgtctcaaccactgtgactcaaaacaacaacagcgaatttgcttggcctggagcttcttcttgggctctcaatggacgtaatagcttgatgaatcctggacctgctatggccagccacaaagaaggagaggaccgtttctttcctttgtctggatctttaatttttggcaaacaaggtaccggcagagacaacgtggatgcggacaaagtcatgataaccaacgaagaagaaattaaaactactaacccggtagcaacggagtcctatggacaagtggccacaaaccaccagagtgcacagcacaatttccctaatgaatttgctcaagctcaaaccggttgggttcaaaaccaaggaatacttccgggtatggtttggcaggacagagatgtgtacctgcaaggacccatttgggccaaaattcctcacacggacggcaactttcacccttctccgctgatgggagggtttggaatgaagcacccgcctcctcagatcctcatcaaaaacacacctgtacctgcggatcctccaacggccttcaacaaggacaagctgaactctttcatcacccagtattctactggccaagtcagcgtggagatcgagtgggagctgcagaaggaaaacagcaagcgctggaacccggagatccagtacacttccaactattacaagtctaataatgttgaatttgctgttaatactgaaggtgtatatagtgaaccccgccccattggcaccagatacctgactcgtaatctg

SEQ ID NO: 62 - DNA, 2229 bp, Adeno-Associated Virus 9
  source 1..2229: mol_type = other DNA
atggctgccgatggttatcttccagattggctcgaggacaaccttagtgaaggaattcgcgagtggtgggctttgaaacctggagcccctcaacccaaggcaaatcaacaacatcaagacaacgctcgaggtcttgtgcttccgggttacaaataccttggacccggcaacggactcgacaagggggagccggtcaacgcagcagacgcggcggccctcgagcacgacaaggcctacgaccagcagctcaaggccggagacaacccgtacctcaagtacaaccacgccgacgccgagttccaggagcggctcaaagaagatacgtcttttgggggcaacctcgggcgagcagtcttccaggccaaaaagaggcttcttgaacctcttggtctggttgaggaagcggctaagacggctcctggaaagaagaggcctgtagagcagtctcctcaggaaccggactcctccgcgggtattggcaaatcgggtgcacagcccgctaaaaagagactcaatttcggtcagactggcgacacagagtcagtcccagaccctcaaccaatcggagaacctcccgcagccccctcaggtgtgggatctcttacaatggcttcaggtggtggcgcaccagtggcagacaataacgaaggtgccgatggagtgggtagttcctcgggaaattggcattgcgattcccaatggctgggggacagagtcatcaccaccagcacccgaacctgggccctgcccacctacaacaatcacctctacaagcaaatctccaacagcacatctggaggatcttcaaatgacaacgcctacttcggctacagcaccccctgggggtattttgacttcaacagattccactgccacttctcaccacgtgactggcagcgactcatcaacaacaactggggattccggcctaagcgactcaacttcaagctcttcaacattcaggtcaaagaggttacggacaacaatggagtcaagaccatcgccaataaccttaccagcacggtccaggtcttcacggactcagactatcagctcccgtacgtgctcgggtcggctcacgagggctgcctcccgccgttcccagcggacgttttcatgattcctcagtacgggtatctgacgcttaatgatggaagccaggccgtgggtcgttcgtccttttactgcctggaatatttcccgtcgcaaatgctaagaacgggtaacaacttccagttcagctacgagtttgagaacgtacctttccatagcagctacgctcacagccaaagcctggaccgactaatgaatccactcatcgaccaatacttgtactatctctctagaactattaacggttctggacagaatcaacaaacgctaaaattcagtgtggccggacccagcaacatggctgtccagggaagaaactacatacctggacccagctaccgacaacaacgtgtctcaaccactgtgactcaaaacaacaacagcgaatttgcttggcctggagcttcttcttgggctctcaatggacgtaatagcttgatgaatcctggacctgctatggccagccacaaagaaggagaggaccgtttctttcctttgtctggatctttaatttttggcaaacaaggtaccggcagagacaacgtggatgcggacaaagtcatgataaccaacgaagaagaaattaaaactactaacccggtagcaacggagtcctatggacaagtggccacaaaccaccagagtgcccagcataactttccaaacgaattcgctcaggcccagaccggttgggttcaaaaccaaggaatacttccgggtatggtttggcaggacagagatgtgtacctgcaaggacccatttgggccaaaattcctcacacggacggcaactttcacccttctccgctgatgggagggtttggaatgaagcacccgcctcctcagatcctcatcaaaaacacacctgtacctgcggatcctccaacggccttcaacaaggacaagctgaactctttcatcacccagtattctactggccaagtcagcgtggagatcgagtgggagctgcagaaggaaaacagcaagcgctggaacccggagatccagtacacttccaactattacaagtctaataatgttgaatttgctgttaatactgaaggtgtatatagtgaaccccgccccattggcaccagatacctgactcgtaatctg

SEQ ID NO: 63 - DNA, 2229 bp, Adeno-Associated Virus 9
  source 1..2229: mol_type = other DNA
atggctgccgatggttatcttccagattggctcgaggacaaccttagtgaaggaattcgcgagtggtgggctttgaaacctggagcccctcaacccaaggcaaatcaacaacatcaagacaacgctcgaggtcttgtgcttccgggttacaaataccttggacccggcaacggactcgacaagggggagccggtcaacgcagcagacgcggcggccctcgagcacgacaaggcctacgaccagcagctcaaggccggagacaacccgtacctcaagtacaaccacgccgacgccgagttccaggagcggctcaaagaagatacgtcttttgggggcaacctcgggcgagcagtcttccaggccaaaaagaggcttcttgaacctcttggtctggttgaggaagcggctaagacggctcctggaaagaagaggcctgtagagcagtctcctcaggaaccggactcctccgcgggtattggcaaatcgggtgcacagcccgctaaaaagagactcaatttcggtcagactggcgacacagagtcagtcccagaccctcaaccaatcggagaacctcccgcagccccctcaggtgtgggatctcttacaatggcttcaggtggtggcgcaccagtggcagacaataacgaaggtgccgatggagtgggtagttcctcgggaaattggcattgcgattcccaatggctgggggacagagtcatcaccaccagcacccgaacctgggccctgcccacctacaacaatcacctctacaagcaaatctccaacagcacatctggaggatcttcaaatgacaacgcctacttcggctacagcaccccctgggggtattttgacttcaacagattccactgccacttctcaccacgtgactggcagcgactcatcaacaacaactggggattccggcctaagcgactcaacttcaagctcttcaacattcaggtcaaagaggttacggacaacaatggagtcaagaccatcgccaataaccttaccagcacggtccaggtcttcacggactcagactatcagctcccgtacgtgctcgggtcggctcacgagggctgcctcccgccgttcccagcggacgttttcatgattcctcagtacgggtatctgacgcttaatgatggaagccaggccgtgggtcgttcgtccttttactgcctggaatatttcccgtcgcaaatgctaagaacgggtaacaacttccagttcagctacgagtttgagaacgtacctttccatagcagctacgctcacagccaaagcctggaccgactaatgaatccactcatcgaccaatacttgtactatctctctagaactattaacggttctggacagaatcaacaaacgctaaaattcagtgtggccggacccagcaacatggctgtccagggaagaaactacatacctggacccagctaccgacaacaacgtgtctcaaccactgtgactcaaaacaacaacagcgaatttgcttggcctggagcttcttcttgggctctcaatggacgtaatagcttgatgaatcctggacctgctatggccagccacaaagaaggagaggaccgtttctttcctttgtctggatctttaatttttggcaaacaaggtaccggcagagacaacgtggatgcggacaaagtcatgataaccaacgaagaagaaattaaaactactaacccggtagcaacggagtcctatggacaagtggccacaaaccaccagagtgcccagcataatttcccgaacgagtttgcacaagctcaaaccggttgggttcaaaaccaaggaatacttccgggtatggtttggcaggacagagatgtgtacctgcaaggacccatttgggccaaaattcctcacacggacggcaactttcacccttctccgctgatgggagggtttggaatgaagcacccgcctcctcagatcctcatcaaaaacacacctgtacctgcggatcctccaacggccttcaacaaggacaagctgaactctttcatcacccagtattctactggccaagtcagcgtggagatcgagtgggagctgcagaaggaaaacagcaagcgctggaacccggagatccagtacacttccaactattacaagtctaataatgttgaatttgctgttaatactgaaggtgtatatagtgaaccccgccccattggcaccagatacctgactcgtaatctg

SEQ ID NO: 64 - DNA, 2229 bp, Adeno-Associated Virus 9
  source 1..2229: mol_type = other DNA
atggctgccgatggttatcttccagattggctcgaggacaaccttagtgaaggaattcgcgagtggtgggctttgaaacctggagcccctcaacccaaggcaaatcaacaacatcaagacaacgctcgaggtcttgtgcttccgggttacaaataccttggacccggcaacggactcgacaagggggagccggtcaacgcagcagacgcggcggccctcgagcacgacaaggcctacgaccagcagctcaaggccggagacaacccgtacctcaagtacaaccacgccgacgccgagttccaggagcggctcaaagaagatacgtcttttgggggcaacctcgggcgagcagtcttccaggccaaaaagaggcttcttgaacctcttggtctggttgaggaagcggctaagacggctcctggaaagaagaggcctgtagagcagtctcctcaggaaccggactcctccgcgggtattggcaaatcgggtgcacagcccgctaaaaagagactcaatttcggtcagactggcgacacagagtcagtcccagaccctcaaccaatcggagaacctcccgcagccccctcaggtgtgggatctcttacaatggcttcaggtggtggcgcaccagtggcagacaataacgaaggtgccgatggagtgggtagttcctcgggaaattggcattgcgattcccaatggctgggggacagagtcatcaccaccagcacccgaacctgggccctgcccacctacaacaatcacctctacaagcaaatctccaacagcacatctggaggatcttcaaatgacaacgcctacttcggctacagcaccccctgggggtattttgacttcaacagattccactgccacttctcaccacgtgactggcagcgactcatcaacaacaactggggattccggcctaagcgactcaacttcaagctcttcaacattcaggtcaaagaggttacggacaacaatggagtcaagaccatcgccaataaccttaccagcacggtccaggtcttcacggactcagactatcagctcccgtacgtgctcgggtcggctcacgagggctgcctcccgccgttcccagcggacgttttcatgattcctcagtacgggtatctgacgcttaatgatggaagccaggccgtgggtcgttcgtccttttactgcctggaatatttcccgtcgcaaatgctaagaacgggtaacaacttccagttcagctacgagtttgagaacgtacctttccatagcagctacgctcacagccaaagcctggaccgactaatgaatccactcatcgaccaatacttgtactatctctctagaactattaacggttctggacagaatcaacaaacgctaaaattcagtgtggccggacccagcaacatggctgtccagggaagaaactacatacctggacccagctaccgacaacaacgtgtctcaaccactgtgactcaaaacaacaacagcgaatttgcttggcctggagcttcttcttgggctctcaatggacgtaatagcttgatgaatcctggacctgctatggccagccacaaagaaggagaggaccgtttctttcctttgtctggatctttaatttttggcaaacaaggtaccggcagagacaacgtggatgcggacaaagtcatgataaccaacgaagaagaaattaaaactactaacccggtagcaacggagtcctatggacaagtggccacaaaccaccagagtgctcaacataactttccgaatgaattcgcacaggctcaaaccggttgggttcaaaaccaaggaatacttccgggtatggtttggcaggacagagatgtgtacctgcaaggacccatttgggccaaaattcctcacacggacggcaactttcacccttctccgctgatgggagggtttggaatgaagcacccgcctcctcagatcctcatcaaaaacacacctgtacctgcggatcctccaacggccttcaacaaggacaagctgaactctttcatcacccagtattctactggccaagtcagcgtggagatcgagtgggagctgcagaaggaaaacagcaagcgctggaacccggagatccagtacacttccaactattacaagtctaataatgttgaatttgctgttaatactgaaggtgtatatagtgaaccccgccccattggcaccagatacctgactcgtaatctg

SEQ ID NO: 65 - DNA, 2229 bp, Adeno-Associated Virus 9
  source 1..2229: mol_type = other DNA
atggctgccgatggttatcttccagattggctcgaggacaaccttagtgaaggaattcgcgagtggtgggctttgaaacctggagcccctcaacccaaggcaaatcaacaacatcaagacaacgctcgaggtcttgtgcttccgggttacaaataccttggacccggcaacggactcgacaagggggagccggtcaacgcagcagacgcggcggccctcgagcacgacaaggcctacgaccagcagctcaaggccggagacaacccgtacctcaagtacaaccacgccgacgccgagttccaggagcggctcaaagaagatacgtcttttgggggcaacctcgggcgagcagtcttccaggccaaaaagaggcttcttgaacctcttggtctggttgaggaagcggctaagacggctcctggaaagaagaggcctgtagagcagtctcctcaggaaccggactcctccgcgggtattggcaaatcgggtgcacagcccgctaaaaagagactcaatttcggtcagactggcgacacagagtcagtcccagaccctcaaccaatcggagaacctcccgcagccccctcaggtgtgggatctcttacaatggcttcaggtggtggcgcaccagtggcagacaataacgaaggtgccgatggagtgggtagttcctcgggaaattggcattgcgattcccaatggctgggggacagagtcatcaccaccagcacccgaacctgggccctgcccacctacaacaatcacctctacaagcaaatctccaacagcacatctggaggatcttcaaatgacaacgcctacttcggctacagcaccccctgggggtattttgacttcaacagattccactgccacttctcaccacgtgactggcagcgactcatcaacaacaactggggattccggcctaagcgactcaacttcaagctcttcaacattcaggtcaaagaggttacggacaacaatggagtcaagaccatcgccaataaccttaccagcacggtccaggtcttcacggactcagactatcagctcccgtacgtgctcgggtcggctcacgagggctgcctcccgccgttcccagcggacgttttcatgattcctcagtacgggtatctgacgcttaatgatggaagccaggccgtgggtcgttcgtccttttactgcctggaatatttcccgtcgcaaatgctaagaacgggtaacaacttccagttcagctacgagtttgagaacgtacctttccatagcagctacgctcacagccaaagcctggaccgactaatgaatccactcatcgaccaatacttgtactatctctctagaactattaacggttctggacagaatcaacaaacgctaaaattcagtgtggccggacccagcaacatggctgtccagggaagaaactacatacctggacccagctaccgacaacaacgtgtctcaaccactgtgactcaaaacaacaacagcgaatttgcttggcctggagcttcttcttgggctctcaatggacgtaatagcttgatgaatcctggacctgctatggccagccacaaagaaggagaggaccgtttctttcctttgtctggatctttaatttttggcaaacaaggtaccggcagagacaacgtggatgcggacaaagtcatgataaccaacgaagaagaaattaaaactactaacccggtagcaacggagtcctatggacaagtggccacaaaccaccagagtgctcaacacaatttcccaaacgaattcgcccaagcgcagaccggttgggttcaaaaccaaggaatacttccgggtatggtttggcaggacagagatgtgtacctgcaaggacccatttgggccaaaattcctcacacggacggcaactttcacccttctccgctgatgggagggtttggaatgaagcacccgcctcctcagatcctcatcaaaaacacacctgtacctgcggatcctccaacggccttcaacaaggacaagctgaactctttcatcacccagtattctactggccaagtcagcgtggagatcgagtgggagctgcagaaggaaaacagcaagcgctggaacccggagatccagtacacttccaactattacaagtctaataatgttgaatttgctgttaatactgaaggtgtatatagtgaaccccgccccattggcaccagatacctgactcgtaatctg

SEQ ID NO: 66 - DNA, 2229 bp, Adeno-Associated Virus 9
  source 1..2229: mol_type = other DNA
atggctgccgatggttatcttccagattggctcgaggacaaccttagtgaaggaattcgcgagtggtgggctttgaaacctggagcccctcaacccaaggcaaatcaacaacatcaagacaacgctcgaggtcttgtgcttccgggttacaaataccttggacccggcaacggactcgacaagggggagccggtcaacgcagcagacgcggcggccctcgagcacgacaaggcctacgaccagcagctcaaggccggagacaacccgtacctcaagtacaaccacgccgacgccgagttccaggagcggctcaaagaagatacgtcttttgggggcaacctcgggcgagcagtcttccaggccaaaaagaggcttcttgaacctcttggtctggttgaggaagcggctaagacggctcctggaaagaagaggcctgtagagcagtctcctcaggaaccggactcctccgcgggtattggcaaatcgggtgcacagcccgctaaaaagagactcaatttcggtcagactggcgacacagagtcagtcccagaccctcaaccaatcggagaacctcccgcagccccctcaggtgtgggatctcttacaatggcttcaggtggtggcgcaccagtggcagacaataacgaaggtgccgatggagtgggtagttcctcgggaaattggcattgcgattcccaatggctgggggacagagtcatcaccaccagcacccgaacctgggccctgcccacctacaacaatcacctctacaagcaaatctccaacagcacatctggaggatcttcaaatgacaacgcctacttcggctacagcaccccctgggggtattttgacttcaacagattccactgccacttctcaccacgtgactggcagcgactcatcaacaacaactggggattccggcctaagcgactcaacttcaagctcttcaacattcaggtcaaagaggttacggacaacaatggagtcaagaccatcgccaataaccttaccagcacggtccaggtcttcacggactcagactatcagctcccgtacgtgctcgggtcggctcacgagggctgcctcccgccgttcccagcggacgttttcatgattcctcagtacgggtatctgacgcttaatgatggaagccaggccgtgggtcgttcgtccttttactgcctggaatatttcccgtcgcaaatgctaagaacgggtaacaacttccagttcagctacgagtttgagaacgtacctttccatagcagctacgctcacagccaaagcctggaccgactaatgaatccactcatcgaccaatacttgtactatctctctagaactattaacggttctggacagaatcaacaaacgctaaaattcagtgtggccggacccagcaacatggctgtccagggaagaaactacatacctggacccagctaccgacaacaacgtgtctcaaccactgtgactcaaaacaacaacagcgaatttgcttggcctggagcttcttcttgggctctcaatggacgtaatagcttgatgaatcctggacctgctatggccagccacaaagaaggagaggaccgtttctttcctttgtctggatctttaatttttggcaaacaaggtaccggcagagacaacgtggatgcggacaaagtcatgataaccaacgaagaagaaattaaaactactaacccggtagcaacggagtcctatggacaagtggccacaaaccaccagagtgcccagcacaatttcccaaacgagtttgcccaagcacagaccggttgggttcaaaaccaaggaatacttccgggtatggtttggcaggacagagatgtgtacctgcaaggacccatttgggccaaaattcctcacacggacggcaactttcacccttctccgctgatgggagggtttggaatgaagcacccgcctcctcagatcctcatcaaaaacacacctgtacctgcggatcctccaacggccttcaacaaggacaagctgaactctttcatcacccagtattctactggccaagtcagcgtggagatcgagtgggagctgcagaaggaaaacagcaagcgctggaacccggagatccagtacacttccaactattacaagtctaataatgttgaatttgctgttaatactgaaggtgtatatagtgaaccccgccccattggcaccagatacctgactcgtaatctg

SEQ ID NO: 67 - DNA, 2229 bp, Adeno-Associated Virus 9
  source 1..2229: mol_type = other DNA
atggctgccgatggttatcttccagattggctcgaggacaaccttagtgaaggaattcgcgagtggtgggctttgaaacctggagcccctcaacccaaggcaaatcaacaacatcaagacaacgctcgaggtcttgtgcttccgggttacaaataccttggacccggcaacggactcgacaagggggagccggtcaacgcagcagacgcggcggccctcgagcacgacaaggcctacgaccagcagctcaaggccggagacaacccgtacctcaagtacaaccacgccgacgccgagttccaggagcggctcaaagaagatacgtcttttgggggcaacctcgggcgagcagtcttccaggccaaaaagaggcttcttgaacctcttggtctggttgaggaagcggctaagacggctcctggaaagaagaggcctgtagagcagtctcctcaggaaccggactcctccgcgggtattggcaaatcgggtgcacagcccgctaaaaagagactcaatttcggtcagactggcgacacagagtcagtcccagaccctcaaccaatcggagaacctcccgcagccccctcaggtgtgggatctcttacaatggcttcaggtggtggcgcaccagtggcagacaataacgaaggtgccgatggagtgggtagttcctcgggaaattggcattgcgattcccaatggctgggggacagagtcatcaccaccagcacccgaacctgggccctgcccacctacaacaatcacctctacaagcaaatctccaacagcacatctggaggatcttcaaatgacaacgcctacttcggctacagcaccccctgggggtattttgacttcaacagattccactgccacttctcaccacgtgactggcagcgactcatcaacaacaactggggattccggcctaagcgactcaacttcaagctcttcaacattcaggtcaaagaggttacggacaacaatggagtcaagaccatcgccaataaccttaccagcacggtccaggtcttcacggactcagactatcagctcccgtacgtgctcgggtcggctcacgagggctgcctcccgccgttcccagcggacgttttcatgattcctcagtacgggtatctgacgcttaatgatggaagccaggccgtgggtcgttcgtccttttactgcctggaatatttcccgtcgcaaatgctaagaacgggtaacaacttccagttcagctacgagtttgagaacgtacctttccatagcagctacgctcacagccaaagcctggaccgactaatgaatccactcatcgaccaatacttgtactatctctctagaactattaacggttctggacagaatcaacaaacgctaaaattcagtgtggccggacccagcaacatggctgtccagggaagaaactacatacctggacccagctaccgacaacaacgtgtctcaaccactgtgactcaaaacaacaacagcgaatttgcttggcctggagcttcttcttgggctctcaatggacgtaatagcttgatgaatcctggacctgctatggccagccacaaagaaggagaggaccgtttctttcctttgtctggatctttaatttttggcaaacaaggtaccggcagagacaacgtggatgcggacaaagtcatgataaccaacgaagaagaaattaaaactactaacccggtagcaacggagtcctatggacaagtggccacaaaccaccagagtgcgcaacacaactttccaaatgaattcgctcaggcacagaccggttgggttcaaaaccaaggaatacttccgggtatggtttggcaggacagagatgtgtacctgcaaggacccatttgggccaaaattcctcacacggacggcaactttcacccttctccgctgatgggagggtttggaatgaagcacccgcctcctcagatcctcatcaaaaacacacctgtacctgcggatcctccaacggccttcaacaaggacaagctgaactctttcatcacccagtattctactggccaagtcagcgtggagatcgagtgggagctgcagaaggaaaacagcaagcgctggaacccggagatccagtacacttccaactattacaagtctaataatgttgaatttgctgttaatactgaaggtgtatatagtgaaccccgccccattggcaccagatacctgactcgtaatctg

SEQ ID NO: 68 - DNA, 2229 bp, Adeno-Associated Virus 9
  source 1..2229: mol_type = other DNA
atggctgccgatggttatcttccagattggctcgaggacaaccttagtgaaggaattcgcgagtggtgggctttgaaacctggagcccctcaacccaaggcaaatcaacaacatcaagacaacgctcgaggtcttgtgcttccgggttacaaataccttggacccggcaacggactcgacaagggggagccggtcaacgcagcagacgcggcggccctcgagcacgacaaggcctacgaccagcagctcaaggccggagacaacccgtacctcaagtacaaccacgccgacgccgagttccaggagcggctcaaagaagatacgtcttttgggggcaacctcgggcgagcagtcttccaggccaaaaagaggcttcttgaacctcttggtctggttgaggaagcggctaagacggctcctggaaagaagaggcctgtagagcagtctcctcaggaaccggactcctccgcgggtattggcaaatcgggtgcacagcccgctaaaaagagactcaatttcggtcagactggcgacacagagtcagtcccagaccctcaaccaatcggagaacctcccgcagccccctcaggtgtgggatctcttacaatggcttcaggtggtggcgcaccagtggcagacaataacgaaggtgccgatggagtgggtagttcctcgggaaattggcattgcgattcccaatggctgggggacagagtcatcaccaccagcacccgaacctgggccctgcccacctacaacaatcacctctacaagcaaatctccaacagcacatctggaggatcttcaaatgacaacgcctacttcggctacagcaccccctgggggtattttgacttcaacagattccactgccacttctcaccacgtgactggcagcgactcatcaacaacaactggggattccggcctaagcgactcaacttcaagctcttcaacattcaggtcaaagaggttacggacaacaatggagtcaagaccatcgccaataaccttaccagcacggtccaggtcttcacggactcagactatcagctcccgtacgtgctcgggtcggctcacgagggctgcctcccgccgttcccagcggacgttttcatgattcctcagtacgggtatctgacgcttaatgatggaagccaggccgtgggtcgttcgtccttttactgcctggaatatttcccgtcgcaaatgctaagaacgggtaacaacttccagttcagctacgagtttgagaacgtacctttccatagcagctacgctcacagccaaagcctggaccgactaatgaatccactcatcgaccaatacttgtactatctctctagaactattaacggttctggacagaatcaacaaacgctaaaattcagtgtggccggacccagcaacatggctgtccagggaagaaactacatacctggacccagctaccgacaacaacgtgtctcaaccactgtgactcaaaacaacaacagcgaatttgcttggcctggagcttcttcttgggctctcaatggacgtaatagcttgatgaatcctggacctgctatggccagccacaaagaaggagaggaccgtttctttcctttgtctggatctttaatttttggcaaacaaggtaccggcagagacaacgtggatgcggacaaagtcatgataaccaacgaagaagaaattaaaactactaacccggtagcaacggagtcctatggacaagtggccacaaaccaccagagtgcccagcataactttccgaatgagtttgctcaggcccaaaccggttgggttcaaaaccaaggaatacttccgggtatggtttggcaggacagagatgtgtacctgcaaggacccatttgggccaaaattcctcacacggacggcaactttcacccttctccgctgatgggagggtttggaatgaagcacccgcctcctcagatcctcatcaaaaacacacctgtacctgcggatcctccaacggccttcaacaaggacaagctgaactctttcatcacccagtattctactggccaagtcagcgtggagatcgagtgggagctgcagaaggaaaacagcaagcgctggaacccggagatccagtacacttccaactattacaagtctaataatgttgaatttgctgttaatactgaaggtgtatatagtgaaccccgccccattggcaccagatacctgactcgtaatctg

SEQ ID NO: 69 - DNA, 2229 bp, Adeno-Associated Virus 9
  source 1..2229: mol_type = other DNA
atggctgccgatggttatcttccagattggctcgaggacaaccttagtgaaggaattcgcgagtggtgggctttgaaacctggagcccctcaacccaaggcaaatcaacaacatcaagacaacgctcgaggtcttgtgcttccgggttacaaataccttggacccggcaacggactcgacaagggggagccggtcaacgcagcagacgcggcggccctcgagcacgacaaggcctacgaccagcagctcaaggccggagacaacccgtacctcaagtacaaccacgccgacgccgagttccaggagcggctcaaagaagatacgtcttttgggggcaacctcgggcgagcagtcttccaggccaaaaagaggcttcttgaacctcttggtctggttgaggaagcggctaagacggctcctggaaagaagaggcctgtagagcagtctcctcaggaaccggactcctccgcgggtattggcaaatcgggtgcacagcccgctaaaaagagactcaatttcggtcagactggcgacacagagtcagtcccagaccctcaaccaatcggagaacctcccgcagccccctcaggtgtgggatctcttacaatggcttcaggtggtggcgcaccagtggcagacaataacgaaggtgccgatggagtgggtagttcctcgggaaattggcattgcgattcccaatggctgggggacagagtcatcaccaccagcacccgaacctgggccctgcccacctacaacaatcacctctacaagcaaatctccaacagcacatctggaggatcttcaaatgacaacgcctacttcggctacagcaccccctgggggtattttgacttcaacagattccactgccacttctcaccacgtgactggcagcgactcatcaacaacaactggggattccggcctaagcgactcaacttcaagctcttcaacattcaggtcaaagaggttacggacaacaatggagtcaagaccatcgccaataaccttaccagcacggtccaggtcttcacggactcagactatcagctcccgtacgtgctcgggtcggctcacgagggctgcctcccgccgttcccagcggacgttttcatgattcctcagtacgggtatctgacgcttaatgatggaagccaggccgtgggtcgttcgtccttttactgcctggaatatttcccgtcgcaaatgctaagaacgggtaacaacttccagttcagctacgagtttgagaacgtacctttccatagcagctacgctcacagccaaagcctggaccgactaatgaatccactcatcgaccaatacttgtactatctctctagaactattaacggttctggacagaatcaacaaacgctaaaattcagtgtggccggacccagcaacatggctgtccagggaagaaactacatacctggacccagctaccgacaacaacgtgtctcaaccactgtgactcaaaacaacaacagcgaatttgcttggcctggagcttcttcttgggctctcaatggacgtaatagcttgatgaatcctggacctgctatggccagccacaaagaaggagaggaccgtttctttcctttgtctggatctttaatttttggcaaacaaggtaccggcagagacaacgtggatgcggacaaagtcatgataaccaacgaagaagaaattaaaactactaacccggtagcaacggagtcctatggacaagtggccacaaaccaccagagtgcccaacataactttccgaacgagttcgcacaggcccagaccggttgggttcaaaaccaaggaatacttccgggtatggtttggcaggacagagatgtgtacctgcaaggacccatttgggccaaaattcctcacacggacggcaactttcacccttctccgctgatgggagggtttggaatgaagcacccgcctcctcagatcctcatcaaaaacacacctgtacctgcggatcctccaacggccttcaacaaggacaagctgaactctttcatcacccagtattctactggccaagtcagcgtggagatcgagtgggagctgcagaaggaaaacagcaagcgctggaacccggagatccagtacacttccaactattacaagtctaataatgttgaatttgctgttaatactgaaggtgtatatagtgaaccccgccccattggcaccagatacctgactcgtaatctg

SEQ ID NO: 70 - DNA, 2229 bp, Adeno-Associated Virus 9
  source 1..2229: mol_type = other DNA
atggctgccgatggttatcttccagattggctcgaggacaaccttagtgaaggaattcgcgagtggtgggctttgaaacctggagcccctcaacccaaggcaaatcaacaacatcaagacaacgctcgaggtcttgtgcttccgggttacaaataccttggacccggcaacggactcgacaagggggagccggtcaacgcagcagacgcggcggccctcgagcacgacaaggcctacgaccagcagctcaaggccggagacaacccgtacctcaagtacaaccacgccgacgccgagttccaggagcggctcaaagaagatacgtcttttgggggcaacctcgggcgagcagtcttccaggccaaaaagaggcttcttgaacctcttggtctggttgaggaagcggctaagacggctcctggaaagaagaggcctgtagagcagtctcctcaggaaccggactcctccgcgggtattggcaaatcgggtgcacagcccgctaaaaagagactcaatttcggtcagactggcgacacagagtcagtcccagaccctcaaccaatcggagaacctcccgcagccccctcaggtgtgggatctcttacaatggcttcaggtggtggcgcaccagtggcagacaataacgaaggtgccgatggagtgggtagttcctcgggaaattggcattgcgattcccaatggctgggggacagagtcatcaccaccagcacccgaacctgggccctgcccacctacaacaatcacctctacaagcaaatctccaacagcacatctggaggatcttcaaatgacaacgcctacttcggctacagcaccccctgggggtattttgacttcaacagattccactgccacttctcaccacgtgactggcagcgactcatcaacaacaactggggattccggcctaagcgactcaacttcaagctcttcaacattcaggtcaaagaggttacggacaacaatggagtcaagaccatcgccaataaccttaccagcacggtccaggtcttcacggactcagactatcagctcccgtacgtgctcgggtcggctcacgagggctgcctcccgccgttcccagcggacgttttcatgattcctcagtacgggtatctgacgcttaatgatggaagccaggccgtgggtcgttcgtccttttactgcctggaatatttcccgtcgcaaatgctaagaacgggtaacaacttccagttcagctacgagtttgagaacgtacctttccatagcagctacgctcacagccaaagcctggaccgactaatgaatccactcatcgaccaatacttgtactatctctctagaactattaacggttctggacagaatcaacaaacgctaaaattcagtgtggccggacccagcaacatggctgtccagggaagaaactacatacctggacccagctaccgacaacaacgtgtctcaaccactgtgactcaaaacaacaacagcgaatttgcttggcctggagcttcttcttgggctctcaatggacgtaatagcttgatgaatcctggacctgctatggccagccacaaagaaggagaggaccgtttctttcctttgtctggatctttaatttttggcaaacaaggtaccggcagagacaacgtggatgcggacaaagtcatgataaccaacgaagaagaaattaaaactactaacccggtagcaacggagtcctatggacaagtggccacaaaccaccagagtgcgcaacacaatttcccgaatgagtttgcgcaagcgcaaaccggttgggttcaaaaccaaggaatacttccgggtatggtttggcaggacagagatgtgtacctgcaaggacccatttgggccaaaattcctcacacggacggcaactttcacccttctccgctgatgggagggtttggaatgaagcacccgcctcctcagatcctcatcaaaaacacacctgtacctgcggatcctccaacggccttcaacaaggacaagctgaactctttcatcacccagtattctactggccaagtcagcgtggagatcgagtgggagctgcagaaggaaaacagcaagcgctggaacccggagatccagtacacttccaactattacaagtctaataatgttgaatttgctgttaatactgaaggtgtatatagtgaaccccgccccattggcaccagatacctgactcgtaatctg

SEQ ID NO: 71 - DNA, 2229 bp, Adeno-Associated Virus 9
  source 1..2229: mol_type = other DNA
atggctgccgatggttatcttccagattggctcgaggacaaccttagtgaaggaattcgcgagtggtgggctttgaaacctggagcccctcaacccaaggcaaatcaacaacatcaagacaacgctcgaggtcttgtgcttccgggttacaaataccttggacccggcaacggactcgacaagggggagccggtcaacgcagcagacgcggcggccctcgagcacgacaaggcctacgaccagcagctcaaggccggagacaacccgtacctcaagtacaaccacgccgacgccgagttccaggagcggctcaaagaagatacgtcttttgggggcaacctcgggcgagcagtcttccaggccaaaaagaggcttcttgaacctcttggtctggttgaggaagcggctaagacggctcctggaaagaagaggcctgtagagcagtctcctcaggaaccggactcctccgcgggtattggcaaatcgggtgcacagcccgctaaaaagagactcaatttcggtcagactggcgacacagagtcagtcccagaccctcaaccaatcggagaacctcccgcagccccctcaggtgtgggatctcttacaatggcttcaggtggtggcgcaccagtggcagacaataacgaaggtgccgatggagtgggtagttcctcgggaaattggcattgcgattcccaatggctgggggacagagtcatcaccaccagcacccgaacctgggccctgcccacctacaacaatcacctctacaagcaaatctccaacagcacatctggaggatcttcaaatgacaacgcctacttcggctacagcaccccctgggggtattttgacttcaacagattccactgccacttctcaccacgtgactggcagcgactcatcaacaacaactggggattccggcctaagcgactcaacttcaagctcttcaacattcaggtcaaagaggttacggacaacaatggagtcaagaccatcgccaataaccttaccagcacggtccaggtcttcacggactcagactatcagctcccgtacgtgctcgggtcggctcacgagggctgcctcccgccgttcccagcggacgttttcatgattcctcagtacgggtatctgacgcttaatgatggaagccaggccgtgggtcgttcgtccttttactgcctggaatatttcccgtcgcaaatgctaagaacgggtaacaacttccagttcagctacgagtttgagaacgtacctttccatagcagctacgctcacagccaaagcctggaccgactaatgaatccactcatcgaccaatacttgtactatctctctagaactattaacggttctggacagaatcaacaaacgctaaaattcagtgtggccggacccagcaacatggctgtccagggaagaaactacatacctggacccagctaccgacaacaacgtgtctcaaccactgtgactcaaaacaacaacagcgaatttgcttggcctggagcttcttcttgggctctcaatggacgtaatagcttgatgaatcctggacctgctatggccagccacaaagaaggagaggaccgtttctttcctttgtctggatctttaatttttggcaaacaaggtaccggcagagacaacgtggatgcggacaaagtcatgataaccaacgaagaagaaattaaaactactaacccggtagcaacggagtcctatggacaagtggccacaaaccaccagagtgcacagatacgtatgcctacggagtttgcgcaagctcagaccggttgggttcaaaaccaaggaatacttccgggtatggtttggcaggacagagatgtgtacctgcaaggacccatttgggccaaaattcctcacacggacggcaactttcacccttctccgctgatgggagggtttggaatgaagcacccgcctcctcagatcctcatcaaaaacacacctgtacctgcggatcctccaacggccttcaacaaggacaagctgaactctttcatcacccagtattctactggccaagtcagcgtggagatcgagtgggagctgcagaaggaaaacagcaagcgctggaacccggagatccagtacacttccaactattacaagtctaataatgttgaatttgctgttaatactgaaggtgtatatagtgaaccccgccccattggcaccagatacctgactcgtaatctg

SEQ ID NO: 72 - DNA, 2229 bp, Adeno-Associated Virus 9
  source 1..2229: mol_type = other DNA
atggctgccgatggttatcttccagattggctcgaggacaaccttagtgaaggaattcgcgagtggtgggctttgaaacctggagcccctcaacccaaggcaaatcaacaacatcaagacaacgctcgaggtcttgtgcttccgggttacaaataccttggacccggcaacggactcgacaagggggagccggtcaacgcagcagacgcggcggccctcgagcacgacaaggcctacgaccagcagctcaaggccggagacaacccgtacctcaagtacaaccacgccgacgccgagttccaggagcggctcaaagaagatacgtcttttgggggcaacctcgggcgagcagtcttccaggccaaaaagaggcttcttgaacctcttggtctggttgaggaagcggctaagacggctcctggaaagaagaggcctgtagagcagtctcctcaggaaccggactcctccgcgggtattggcaaatcgggtgcacagcccgctaaaaagagactcaatttcggtcagactggcgacacagagtcagtcccagaccctcaaccaatcggagaacctcccgcagccccctcaggtgtgggatctcttacaatggcttcaggtggtggcgcaccagtggcagacaataacgaaggtgccgatggagtgggtagttcctcgggaaattggcattgcgattcccaatggctgggggacagagtcatcaccaccagcacccgaacctgggccctgcccacctacaacaatcacctctacaagcaaatctccaacagcacatctggaggatcttcaaatgacaacgcctacttcggctacagcaccccctgggggtattttgacttcaacagattccactgccacttctcaccacgtgactggcagcgactcatcaacaacaactggggattccggcctaagcgactcaacttcaagctcttcaacattcaggtcaaagaggttacggacaacaatggagtcaagaccatcgccaataaccttaccagcacggtccaggtcttcacggactcagactatcagctcccgtacgtgctcgggtcggctcacgagggctgcctcccgccgttcccagcggacgttttcatgattcctcagtacgggtatctgacgcttaatgatggaagccaggccgtgggtcgttcgtccttttactgcctggaatatttcccgtcgcaaatgctaagaacgggtaacaacttccagttcagctacgagtttgagaacgtacctttccatagcagctacgctcacagccaaagcctggaccgactaatgaatccactcatcgaccaatacttgtactatctctctagaactattaacggttctggacagaatcaacaaacgctaaaattcagtgtggccggacccagcaacatggctgtccagggaagaaactacatacctggacccagctaccgacaacaacgtgtctcaaccactgtgactcaaaacaacaacagcgaatttgcttggcctggagcttcttcttgggctctcaatggacgtaatagcttgatgaatcctggacctgctatggccagccacaaagaaggagaggaccgtttctttcctttgtctggatctttaatttttggcaaacaaggtaccggcagagacaacgtggatgcggacaaagtcatgataaccaacgaagaagaaattaaaactactaacccggtagcaacggagtcctatggacaagtggccacaaaccaccagagtgctcagataaggatgcccacggagtttgcacaggcgcagaccggttgggttcaaaaccaaggaatacttccgggtatggtttggcaggacagagatgtgtacctgcaaggacccatttgggccaaaattcctcacacggacggcaactttcacccttctccgctgatgggagggtttggaatgaagcacccgcctcctcagatcctcatcaaaaacacacctgtacctgcggatcctccaacggccttcaacaaggacaagctgaactctttcatcacccagtattctactggccaagtcagcgtggagatcgagtgggagctgcagaaggaaaacagcaagcgctggaacccggagatccagtacacttccaactattacaagtctaataatgttgaatttgctgttaatactgaaggtgtatatagtgaaccccgccccattggcaccagatacctgactcgtaatctg

SEQ ID NO: 73 - DNA, 2229 bp, Adeno-Associated Virus 9
  source 1..2229: mol_type = other DNA
atggctgccgatggttatcttccagattggctcgaggacaaccttagtgaaggaattcgcgagtggtgggctttgaaacctggagcccctcaacccaaggcaaatcaacaacatcaagacaacgctcgaggtcttgtgcttccgggttacaaataccttggacccggcaacggactcgacaagggggagccggtcaacgcagcagacgcggcggccctcgagcacgacaaggcctacgaccagcagctcaaggccggagacaacccgtacctcaagtacaaccacgccgacgccgagttccaggagcggctcaaagaagatacgtcttttgggggcaacctcgggcgagcagtcttccaggccaaaaagaggcttcttgaacctcttggtctggttgaggaagcggctaagacggctcctggaaagaagaggcctgtagagcagtctcctcaggaaccggactcctccgcgggtattggcaaatcgggtgcacagcccgctaaaaagagactcaatttcggtcagactggcgacacagagtcagtcccagaccctcaaccaatcggagaacctcccgcagccccctcaggtgtgggatctcttacaatggcttcaggtggtggcgcaccagtggcagacaataacgaaggtgccgatggagtgggtagttcctcgggaaattggcattgcgattcccaatggctgggggacagagtcatcaccaccagcacccgaacctgggccctgcccacctacaacaatcacctctacaagcaaatctccaacagcacatctggaggatcttcaaatgacaacgcctacttcggctacagcaccccctgggggtattttgacttcaacagattccactgccacttctcaccacgtgactggcagcgactcatcaacaacaactggggattccggcctaagcgactcaacttcaagctcttcaacattcaggtcaaagaggttacggacaacaatggagtcaagaccatcgccaataaccttaccagcacggtccaggtcttcacggactcagactatcagctcccgtacgtgctcgggtcggctcacgagggctgcctcccgccgttcccagcggacgttttcatgattcctcagtacgggtatctgacgcttaatgatggaagccaggccgtgggtcgttcgtccttttactgcctggaatatttcccgtcgcaaatgctaagaacgggtaacaacttccagttcagctacgagtttgagaacgtacctttccatagcagctacgctcacagccaaagcctggaccgactaatgaatccactcatcgaccaatacttgtactatctctctagaactattaacggttctggacagaatcaacaaacgctaaaattcagtgtggccggacccagcaacatggctgtccagggaagaaactacatacctggacccagctaccgacaacaacgtgtctcaaccactgtgactcaaaacaacaacagcgaatttgcttggcctggagcttcttcttgggctctcaatggacgtaatagcttgatgaatcctggacctgctatggccagccacaaagaaggagaggaccgtttctttcctttgtctggatctttaatttttggcaaacaaggtaccggcagagacaacgtggatgcggacaaagtcatgataaccaacgaagaagaaattaaaactactaacccggtagcaacggagtcctatggacaagtggccacaaaccaccagagtgcgcaaattcggatgcctacggaattcgcgcaagctcagaccggttgggttcaaaaccaaggaatacttccgggtatggtttggcaggacagagatgtgtacctgcaaggacccatttgggccaaaattcctcacacggacggcaactttcacccttctccgctgatgggagggtttggaatgaagcacccgcctcctcagatcctcatcaaaaacacacctgtacctgcggatcctccaacggccttcaacaaggacaagctgaactctttcatcacccagtattctactggccaagtcagcgtggagatcgagtgggagctgcagaaggaaaacagcaagcgctggaacccggagatccagtacacttccaactattacaagtctaataatgttgaatttgctgttaatactgaaggtgtatatagtgaaccccgccccattggcaccagatacctgactcgtaatctg

SEQ ID NO: 74 - DNA, 2229 bp, Adeno-Associated Virus 9
  source 1..2229: mol_type = other DNA
atggctgccgatggttatcttccagattggctcgaggacaaccttagtgaaggaattcgcgagtggtgggctttgaaacctggagcccctcaacccaaggcaaatcaacaacatcaagacaacgctcgaggtcttgtgcttccgggttacaaataccttggacccggcaacggactcgacaagggggagccggtcaacgcagcagacgcggcggccctcgagcacgacaaggcctacgaccagcagctcaaggccggagacaacccgtacctcaagtacaaccacgccgacgccgagttccaggagcggctcaaagaagatacgtcttttgggggcaacctcgggcgagcagtcttccaggccaaaaagaggcttcttgaacctcttggtctggttgaggaagcggctaagacggctcctggaaagaagaggcctgtagagcagtctcctcaggaaccggactcctccgcgggtattggcaaatcgggtgcacagcccgctaaaaagagactcaatttcggtcagactggcgacacagagtcagtcccagaccctcaaccaatcggagaacctcccgcagccccctcaggtgtgggatctcttacaatggcttcaggtggtggcgcaccagtggcagacaataacgaaggtgccgatggagtgggtagttcctcgggaaattggcattgcgattcccaatggctgggggacagagtcatcaccaccagcacccgaacctgggccctgcccacctacaacaatcacctctacaagcaaatctccaacagcacatctggaggatcttcaaatgacaacgcctacttcggctacagcaccccctgggggtattttgacttcaacagattccactgccacttctcaccacgtgactggcagcgactcatcaacaacaactggggattccggcctaagcgactcaacttcaagctcttcaacattcaggtcaaagaggttacggacaacaatggagtcaagaccatcgccaataaccttaccagcacggtccaggtcttcacggactcagactatcagctcccgtacgtgctcgggtcggctcacgagggctgcctcccgccgttcccagcggacgttttcatgattcctcagtacgggtatctgacgcttaatgatggaagccaggccgtgggtcgttcgtccttttactgcctggaatatttcccgtcgcaaatgctaagaacgggtaacaacttccagttcagctacgagtttgagaacgtacctttccatagcagctacgctcacagccaaagcctggaccgactaatgaatccactcatcgaccaatacttgtactatctctctagaactattaacggttctggacagaatcaacaaacgctaaaattcagtgtggccggacccagcaacatggctgtccagggaagaaactacatacctggacccagctaccgacaacaacgtgtctcaaccactgtgactcaaaacaacaacagcgaatttgcttggcctggagcttcttcttgggctctcaatggacgtaatagcttgatgaatcctggacctgctatggccagccacaaagaaggagaggaccgtttctttcctttgtctggatctttaatttttggcaaacaaggtaccggcagagacaacgtggatgcggacaaagtcatgataaccaacgaagaagaaattaaaactactaacccggtagcaacggagtcctatggacaagtggccacaaaccaccagagtgcccagattagaatgccgacggagttcgcacaagcacagaccggttgggttcaaaaccaaggaatacttccgggtatggtttggcaggacagagatgtgtacctgcaaggacccatttgggccaaaattcctcacacggacggcaactttcacccttctccgctgatgggagggtttggaatgaagcacccgcctcctcagatcctcatcaaaaacacacctgtacctgcggatcctccaacggccttcaacaaggacaagctgaactctttcatcacccagtattctactggccaagtcagcgtggagatcgagtgggagctgcagaaggaaaacagcaagcgctggaacccggagatccagtacacttccaactattacaagtctaataatgttgaatttgctgttaatactgaaggtgtatatagtgaaccccgccccattggcaccagatacctgactcgtaatctg

SEQ ID NO: 75 - DNA, 2229 bp, Adeno-Associated Virus 9
  source 1..2229: mol_type = other DNA
atggctgccgatggttatcttccagattggctcgaggacaaccttagtgaaggaattcgcgagtggtgggctttgaaacctggagcccctcaacccaaggcaaatcaacaacatcaagacaacgctcgaggtcttgtgcttccgggttacaaataccttggacccggcaacggactcgacaagggggagccggtcaacgcagcagacgcggcggccctcgagcacgacaaggcctacgaccagcagctcaaggccggagacaacccgtacctcaagtacaaccacgccgacgccgagttccaggagcggctcaaagaagatacgtcttttgggggcaacctcgggcgagcagtcttccaggccaaaaagaggcttcttgaacctcttggtctggttgaggaagcggctaagacggctcctggaaagaagaggcctgtagagcagtctcctcaggaaccggactcctccgcgggtattggcaaatcgggtgcacagcccgctaaaaagagactcaatttcggtcagactggcgacacagagtcagtcccagaccctcaaccaatcggagaacctcccgcagccccctcaggtgtgggatctcttacaatggcttcaggtggtggcgcaccagtggcagacaataacgaaggtgccgatggagtgggtagttcctcgggaaattggcattgcgattcccaatggctgggggacagagtcatcaccaccagcacccgaacctgggccctgcccacctacaacaatcacctctacaagcaaatctccaacagcacatctggaggatcttcaaatgacaacgcctacttcggctacagcaccccctgggggtattttgacttcaacagattccactgccacttctcaccacgtgactggcagcgactcatcaacaacaactggggattccggcctaagcgactcaacttcaagctcttcaacattcaggtcaaagaggttacggacaacaatggagtcaagaccatcgccaataaccttaccagcacggtccaggtcttcacggactcagactatcagctcccgtacgtgctcgggtcggctcacgagggctgcctcccgccgttcccagcggacgttttcatgattcctcagtacgggtatctgacgcttaatgatggaagccaggccgtgggtcgttcgtccttttactgcctggaatatttcccgtcgcaaatgctaagaacgggtaacaacttccagttcagctacgagtttgagaacgtacctttccatagcagctacgctcacagccaaagcctggaccgactaatgaatccactcatcgaccaatacttgtactatctctctagaactattaacggttctggacagaatcaacaaacgctaaaattcagtgtggccggacccagcaacatggctgtccagggaagaaactacatacctggacccagctaccgacaacaacgtgtctcaaccactgtgactcaaaacaacaacagcgaatttgcttggcctggagcttcttcttgggctctcaatggacgtaatagcttgatgaatcctggacctgctatggccagccacaaagaaggagaggaccgtttctttcctttgtctggatctttaatttttggcaaacaaggtaccggcagagacaacgtggatgcggacaaagtcatgataaccaacgaagaagaaattaaaactactaacccggtagcaacggagtcctatggacaagtggccacaaaccaccagagtgcccaaatcaggatgccaaccgaattcgcccaggcacaaaccggttgggttcaaaaccaaggaatacttccgggtatggtttggcaggacagagatgtgtacctgcaaggacccatttgggccaaaattcctcacacggacggcaactttcacccttctccgctgatgggagggtttggaatgaagcacccgcctcctcagatcctcatcaaaaacacacctgtacctgcggatcctccaacggccttcaacaaggacaagctgaactctttcatcacccagtattctactggccaagtcagcgtggagatcgagtgggagctgcagaaggaaaacagcaagcgctggaacccggagatccagtacacttccaactattacaagtctaataatgttgaatttgctgttaatactgaaggtgtatatagtgaaccccgccccattggcaccagatacctgactcgtaatctg

SEQ ID NO: 76 - DNA, 2229 bp, Adeno-Associated Virus 9
  source 1..2229: mol_type = other DNA
atggctgccgatggttatcttccagattggctcgaggacaaccttagtgaaggaattcgcgagtggtgggctttgaaacctggagcccctcaacccaaggcaaatcaacaacatcaagacaacgctcgaggtcttgtgcttccgggttacaaataccttggacccggcaacggactcgacaagggggagccggtcaacgcagcagacgcggcggccctcgagcacgacaaggcctacgaccagcagctcaaggccggagacaacccgtacctcaagtacaaccacgccgacgccgagttccaggagcggctcaaagaagatacgtcttttgggggcaacctcgggcgagcagtcttccaggccaaaaagaggcttcttgaacctcttggtctggttgaggaagcggctaagacggctcctggaaagaagaggcctgtagagcagtctcctcaggaaccggactcctccgcgggtattggcaaatcgggtgcacagcccgctaaaaagagactcaatttcggtcagactggcgacacagagtcagtcccagaccctcaaccaatcggagaacctcccgcagccccctcaggtgtgggatctcttacaatggcttcaggtggtggcgcaccagtggcagacaataacgaaggtgccgatggagtgggtagttcctcgggaaattggcattgcgattcccaatggctgggggacagagtcatcaccaccagcacccgaacctgggccctgcccacctacaacaatcacctctacaagcaaatctccaacagcacatctggaggatcttcaaatgacaacgcctacttcggctacagcaccccctgggggtattttgacttcaacagattccactgccacttctcaccacgtgactggcagcgactcatcaacaacaactggggattccggcctaagcgactcaacttcaagctcttcaacattcaggtcaaagaggttacggacaacaatggagtcaagaccatcgccaataaccttaccagcacggtccaggtcttcacggactcagactatcagctcccgtacgtgctcgggtcggctcacgagggctgcctcccgccgttcccagcggacgttttcatgattcctcagtacgggtatctgacgcttaatgatggaagccaggccgtgggtcgttcgtccttttactgcctggaatatttcccgtcgcaaatgctaagaacgggtaacaacttccagttcagctacgagtttgagaacgtacctttccatagcagctacgctcacagccaaagcctggaccgactaatgaatccactcatcgaccaatacttgtactatctctctagaactattaacggttctggacagaatcaacaaacgctaaaattcagtgtggccggacccagcaacatggctgtccagggaagaaactacatacctggacccagctaccgacaacaacgtgtctcaaccactgtgactcaaaacaacaacagcgaatttgcttggcctggagcttcttcttgggctctcaatggacgtaatagcttgatgaatcctggacctgctatggccagccacaaagaaggagaggaccgtttctttcctttgtctggatctttaatttttggcaaacaaggtaccggcagagacaacgtggatgcggacaaagtcatgataaccaacgaagaagaaattaaaactactaacccggtagcaacggagtcctatggacaagtggccacaaaccaccagagtgcacaaatcaggatgccgacggaattcgcgcaggctcaaaccggttgggttcaaaaccaaggaatacttccgggtatggtttggcaggacagagatgtgtacctgcaaggacccatttgggccaaaattcctcacacggacggcaactttcacccttctccgctgatgggagggtttggaatgaagcacccgcctcctcagatcctcatcaaaaacacacctgtacctgcggatcctccaacggccttcaacaaggacaagctgaactctttcatcacccagtattctactggccaagtcagcgtggagatcgagtgggagctgcagaaggaaaacagcaagcgctggaacccggagatccagtacacttccaactattacaagtctaataatgttgaatttgctgttaatactgaaggtgtatatagtgaaccccgccccattggcaccagatacctgactcgtaatctg

SEQ ID NO: 77 - DNA, 2229 bp, Adeno-Associated Virus 9
  source 1..2229: mol_type = other DNA
atggctgccgatggttatcttccagattggctcgaggacaaccttagtgaaggaattcgcgagtggtgggctttgaaacctggagcccctcaacccaaggcaaatcaacaacatcaagacaacgctcgaggtcttgtgcttccgggttacaaataccttggacccggcaacggactcgacaagggggagccggtcaacgcagcagacgcggcggccctcgagcacgacaaggcctacgaccagcagctcaaggccggagacaacccgtacctcaagtacaaccacgccgacgccgagttccaggagcggctcaaagaagatacgtcttttgggggcaacctcgggcgagcagtcttccaggccaaaaagaggcttcttgaacctcttggtctggttgaggaagcggctaagacggctcctggaaagaagaggcctgtagagcagtctcctcaggaaccggactcctccgcgggtattggcaaatcgggtgcacagcccgctaaaaagagactcaatttcggtcagactggcgacacagagtcagtcccagaccctcaaccaatcggagaacctcccgcagccccctcaggtgtgggatctcttacaatggcttcaggtggtggcgcaccagtggcagacaataacgaaggtgccgatggagtgggtagttcctcgggaaattggcattgcgattcccaatggctgggggacagagtcatcaccaccagcacccgaacctgggccctgcccacctacaacaatcacctctacaagcaaatctccaacagcacatctggaggatcttcaaatgacaacgcctacttcggctacagcaccccctgggggtattttgacttcaacagattccactgccacttctcaccacgtgactggcagcgactcatcaacaacaactggggattccggcctaagcgactcaacttcaagctcttcaacattcaggtcaaagaggttacggacaacaatggagtcaagaccatcgccaataaccttaccagcacggtccaggtcttcacggactcagactatcagctcccgtacgtgctcgggtcggctcacgagggctgcctcccgccgttcccagcggacgttttcatgattcctcagtacgggtatctgacgcttaatgatggaagccaggccgtgggtcgttcgtccttttactgcctggaatatttcccgtcgcaaatgctaagaacgggtaacaacttccagttcagctacgagtttgagaacgtacctttccatagcagctacgctcacagccaaagcctggaccgactaatgaatccactcatcgaccaatacttgtactatctctctagaactattaacggttctggacagaatcaacaaacgctaaaattcagtgtggccggacccagcaacatggctgtccagggaagaaactacatacctggacccagctaccgacaacaacgtgtctcaaccactgtgactcaaaacaacaacagcgaatttgcttggcctggagcttcttcttgggctctcaatggacgtaatagcttgatgaatcctggacctgctatggccagccacaaagaaggagaggaccgtttctttcctttgtctggatctttaatttttggcaaacaaggtaccggcagagacaacgtggatgcggacaaagtcatgataaccaacgaagaagaaattaaaactactaacccggtagcaacggagtcctatggacaagtggccacaaaccaccagagtgcccaaatccgtatgccgaccgaattcgcgcaagcccaaaccggttgggttcaaaaccaaggaatacttccgggtatggtttggcaggacagagatgtgtacctgcaaggacccatttgggccaaaattcctcacacggacggcaactttcacccttctccgctgatgggagggtttggaatgaagcacccgcctcctcagatcctcatcaaaaacacacctgtacctgcggatcctccaacggccttcaacaaggacaagctgaactctttcatcacccagtattctactggccaagtcagcgtggagatcgagtgggagctgcagaaggaaaacagcaagcgctggaacccggagatccagtacacttccaactattacaagtctaataatgttgaatttgctgttaatactgaaggtgtatatagtgaaccccgccccattggcaccagatacctgactcgtaatctg

SEQ ID NO: 78 - DNA, 2229 bp, Adeno-Associated Virus 9
  source 1..2229: mol_type = other DNA
atggctgccgatggttatcttccagattggctcgaggacaaccttagtgaaggaattcgcgagtggtgggctttgaaacctggagcccctcaacccaaggcaaatcaacaacatcaagacaacgctcgaggtcttgtgcttccgggttacaaataccttggacccggcaacggactcgacaagggggagccggtcaacgcagcagacgcggcggccctcgagcacgacaaggcctacgaccagcagctcaaggccggagacaacccgtacctcaagtacaaccacgccgacgccgagttccaggagcggctcaaagaagatacgtcttttgggggcaacctcgggcgagcagtcttccaggccaaaaagaggcttcttgaacctcttggtctggttgaggaagcggctaagacggctcctggaaagaagaggcctgtagagcagtctcctcaggaaccggactcctccgcgggtattggcaaatcgggtgcacagcccgctaaaaagagactcaatttcggtcagactggcgacacagagtcagtcccagaccctcaaccaatcggagaacctcccgcagccccctcaggtgtgggatctcttacaatggcttcaggtggtggcgcaccagtggcagacaataacgaaggtgccgatggagtgggtagttcctcgggaaattggcattgcgattcccaatggctgggggacagagtcatcaccaccagcacccgaacctgggccctgcccacctacaacaatcacctctacaagcaaatctccaacagcacatctggaggatcttcaaatgacaacgcctacttcggctacagcaccccctgggggtattttgacttcaacagattccactgccacttctcaccacgtgactggcagcgactcatcaacaacaactggggattccggcctaagcgactcaacttcaagctcttcaacattcaggtcaaagaggttacggacaacaatggagtcaagaccatcgccaataaccttaccagcacggtccaggtcttcacggactcagactatcagctcccgtacgtgctcgggtcggctcacgagggctgcctcccgccgttcccagcggacgttttcatgattcctcagtacgggtatctgacgcttaatgatggaagccaggccgtgggtcgttcgtccttttactgcctggaatatttcccgtcgcaaatgctaagaacgggtaacaacttccagttcagctacgagtttgagaacgtacctttccatagcagctacgctcacagccaaagcctggaccgactaatgaatccactcatcgaccaatacttgtactatctctctagaactattaacggttctggacagaatcaacaaacgctaaaattcagtgtggccggacccagcaacatggctgtccagggaagaaactacatacctggacccagctaccgacaacaacgtgtctcaaccactgtgactcaaaacaacaacagcgaatttgcttggcctggagcttcttcttgggctctcaatggacgtaatagcttgatgaatcctggacctgctatggccagccacaaagaaggagaggaccgtttctttcctttgtctggatctttaatttttggcaaacaaggtaccggcagagacaacgtggatgcggacaaagtcatgataaccaacgaagaagaaattaaaactactaacccggtagcaacggagtcctatggacaagtggccacaaaccaccagagtgctcagatccgaatgcccacagagtttgctcaggcacaaaccggttgggttcaaaaccaaggaatacttccgggtatggtttggcaggacagagatgtgtacctgcaaggacccatttgggccaaaattcctcacacggacggcaactttcacccttctccgctgatgggagggtttggaatgaagcacccgcctcctcagatcctcatcaaaaacacacctgtacctgcggatcctccaacggccttcaacaaggacaagctgaactctttcatcacccagtattctactggccaagtcagcgtggagatcgagtgggagctgcagaaggaaaacagcaagcgctggaacccggagatccagtacacttccaactattacaagtctaataatgttgaatttgctgttaatactgaaggtgtatatagtgaaccccgccccattggcaccagatacctgactcgtaatctg

SEQ ID NO: 79 - DNA, 2229 bp, Adeno-Associated Virus 9
  source 1..2229: mol_type = other DNA
atggctgccgatggttatcttccagattggctcgaggacaaccttagtgaaggaattcgcgagtggtgggctttgaaacctggagcccctcaacccaaggcaaatcaacaacatcaagacaacgctcgaggtcttgtgcttccgggttacaaataccttggacccggcaacggactcgacaagggggagccggtcaacgcagcagacgcggcggccctcgagcacgacaaggcctacgaccagcagctcaaggccggagacaacccgtacctcaagtacaaccacgccgacgccgagttccaggagcggctcaaagaagatacgtcttttgggggcaacctcgggcgagcagtcttccaggccaaaaagaggcttcttgaacctcttggtctggttgaggaagcggctaagacggctcctggaaagaagaggcctgtagagcagtctcctcaggaaccggactcctccgcgggtattggcaaatcgggtgcacagcccgctaaaaagagactcaatttcggtcagactggcgacacagagtcagtcccagaccctcaaccaatcggagaacctcccgcagccccctcaggtgtgggatctcttacaatggcttcaggtggtggcgcaccagtggcagacaataacgaaggtgccgatggagtgggtagttcctcgggaaattggcattgcgattcccaatggctgggggacagagtcatcaccaccagcacccgaacctgggccctgcccacctacaacaatcacctctacaagcaaatctccaacagcacatctggaggatcttcaaatgacaacgcctacttcggctacagcaccccctgggggtattttgacttcaacagattccactgccacttctcaccacgtgactggcagcgactcatcaacaacaactggggattccggcctaagcgactcaacttcaagctcttcaacattcaggtcaaagaggttacggacaacaatggagtcaagaccatcgccaataaccttaccagcacggtccaggtcttcacggactcagactatcagctcccgtacgtgctcgggtcggctcacgagggctgcctcccgccgttcccagcggacgttttcatgattcctcagtacgggtatctgacgcttaatgatggaagccaggccgtgggtcgttcgtccttttactgcctggaatatttcccgtcgcaaatgctaagaacgggtaacaacttccagttcagctacgagtttgagaacgtacctttccatagcagctacgctcacagccaaagcctggaccgactaatgaatccactcatcgaccaatacttgtactatctctctagaactattaacggttctggacagaatcaacaaacgctaaaattcagtgtggccggacccagcaacatggctgtccagggaagaaactacatacctggacccagctaccgacaacaacgtgtctcaaccactgtgactcaaaacaacaacagcgaatttgcttggcctggagcttcttcttgggctctcaatggacgtaatagcttgatgaatcctggacctgctatggccagccacaaagaaggagaggaccgtttctttcctttgtctggatctttaatttttggcaaacaaggtaccggcagagacaacgtggatgcggacaaagtcatgataaccaacgaagaagaaattaaaactactaacccggtagcaacggagtcctatggacaagtggccacaaaccaccagagtgctcaaatccgaatgccaaccgaatttgctcaggcgcaaaccggttgggttcaaaaccaaggaatacttccgggtatggtttggcaggacagagatgtgtacctgcaaggacccatttgggccaaaattcctcacacggacggcaactttcacccttctccgctgatgggagggtttggaatgaagcacccgcctcctcagatcctcatcaaaaacacacctgtacctgcggatcctccaacggccttcaacaaggacaagctgaactctttcatcacccagtattctactggccaagtcagcgtggagatcgagtgggagctgcagaaggaaaacagcaagcgctggaacccggagatccagtacacttccaactattacaagtctaataatgttgaatttgctgttaatactgaaggtgtatatagtgaaccccgccccattggcaccagatacctgactcgtaatctg

SEQ ID NO: 80 - DNA, 2229 bp, Adeno-Associated Virus 9
  source 1..2229: mol_type = other DNA
atggctgccgatggttatcttccagattggctcgaggacaaccttagtgaaggaattcgcgagtggtgggctttgaaacctggagcccctcaacccaaggcaaatcaacaacatcaagacaacgctcgaggtcttgtgcttccgggttacaaataccttggacccggcaacggactcgacaagggggagccggtcaacgcagcagacgcggcggccctcgagcacgacaaggcctacgaccagcagctcaaggccggagacaacccgtacctcaagtacaaccacgccgacgccgagttccaggagcggctcaaagaagatacgtcttttgggggcaacctcgggcgagcagtcttccaggccaaaaagaggcttcttgaacctcttggtctggttgaggaagcggctaagacggctcctggaaagaagaggcctgtagagcagtctcctcaggaaccggactcctccgcgggtattggcaaatcgggtgcacagcccgctaaaaagagactcaatttcggtcagactggcgacacagagtcagtcccagaccctcaaccaatcggagaacctcccgcagccccctcaggtgtgggatctcttacaatggcttcaggtggtggcgcaccagtggcagacaataacgaaggtgccgatggagtgggtagttcctcgggaaattggcattgcgattcccaatggctgggggacagagtcatcaccaccagcacccgaacctgggccctgcccacctacaacaatcacctctacaagcaaatctccaacagcacatctggaggatcttcaaatgacaacgcctacttcggctacagcaccccctgggggtattttgacttcaacagattccactgccacttctcaccacgtgactggcagcgactcatcaacaacaactggggattccggcctaagcgactcaacttcaagctcttcaacattcaggtcaaagaggttacggacaacaatggagtcaagaccatcgccaataaccttaccagcacggtccaggtcttcacggactcagactatcagctcccgtacgtgctcgggtcggctcacgagggctgcctcccgccgttcccagcggacgttttcatgattcctcagtacgggtatctgacgcttaatgatggaagccaggccgtgggtcgttcgtccttttactgcctggaatatttcccgtcgcaaatgctaagaacgggtaacaacttccagttcagctacgagtttgagaacgtacctttccatagcagctacgctcacagccaaagcctggaccgactaatgaatccactcatcgaccaatacttgtactatctctctagaactattaacggttctggacagaatcaacaaacgctaaaattcagtgtggccggacccagcaacatggctgtccagggaagaaactacatacctggacccagctaccgacaacaacgtgtctcaaccactgtgactcaaaacaacaacagcgaatttgcttggcctggagcttcttcttgggctctcaatggacgtaatagcttgatgaatcctggacctgctatggccagccacaaagaaggagaggaccgtttctttcctttgtctggatctttaatttttggcaaacaaggtaccggcagagacaacgtggatgcggacaaagtcatgataaccaacgaagaagaaattaaaactactaacccggtagcaacggagtcctatggacaagtggccacaaaccaccagagtgcccagatacgtatgccaaccgagtttgcccaagcgcagaccggttgggttcaaaaccaaggaatacttccgggtatggtttggcaggacagagatgtgtacctgcaaggacccatttgggccaaaattcctcacacggacggcaactttcacccttctccgctgatgggagggtttggaatgaagcacccgcctcctcagatcctcatcaaaaacacacctgtacctgcggatcctccaacggccttcaacaaggacaagctgaactctttcatcacccagtattctactggccaagtcagcgtggagatcgagtgggagctgcagaaggaaaacagcaagcgctggaacccggagatccagtacacttccaactattacaagtctaataatgttgaatttgctgttaatactgaaggtgtatatagtgaaccccgccccattggcaccagatacctgactcgtaatctg

SEQ ID NO: 81 - DNA, 2229 bp, Adeno-Associated Virus 9
  source 1..2229: mol_type = other DNA
atggctgccgatggttatcttccagattggctcgaggacaaccttagtgaaggaattcgcgagtggtgggctttgaaacctggagcccctcaacccaaggcaaatcaacaacatcaagacaacgctcgaggtcttgtgcttccgggttacaaataccttggacccggcaacggactcgacaagggggagccggtcaacgcagcagacgcggcggccctcgagcacgacaaggcctacgaccagcagctcaaggccggagacaacccgtacctcaagtacaaccacgccgacgccgagttccaggagcggctcaaagaagatacgtcttttgggggcaacctcgggcgagcagtcttccaggccaaaaagaggcttcttgaacctcttggtctggttgaggaagcggctaagacggctcctggaaagaagaggcctgtagagcagtctcctcaggaaccggactcctccgcgggtattggcaaatcgggtgcacagcccgctaaaaagagactcaatttcggtcagactggcgacacagagtcagtcccagaccctcaaccaatcggagaacctcccgcagccccctcaggtgtgggatctcttacaatggcttcaggtggtggcgcaccagtggcagacaataacgaaggtgccgatggagtgggtagttcctcgggaaattggcattgcgattcccaatggctgggggacagagtcatcaccaccagcacccgaacctgggccctgcccacctacaacaatcacctctacaagcaaatctccaacagcacatctggaggatcttcaaatgacaacgcctacttcggctacagcaccccctgggggtattttgacttcaacagattccactgccacttctcaccacgtgactggcagcgactcatcaacaacaactggggattccggcctaagcgactcaacttcaagctcttcaacattcaggtcaaagaggttacggacaacaatggagtcaagaccatcgccaataaccttaccagcacggtccaggtcttcacggactcagactatcagctcccgtacgtgctcgggtcggctcacgagggctgcctcccgccgttcccagcggacgttttcatgattcctcagtacgggtatctgacgcttaatgatggaagccaggccgtgggtcgttcgtccttttactgcctggaatatttcccgtcgcaaatgctaagaacgggtaacaacttccagttcagctacgagtttgagaacgtacctttccatagcagctacgctcacagccaaagcctggaccgactaatgaatccactcatcgaccaatacttgtactatctctctagaactattaacggttctggacagaatcaacaaacgctaaaattcagtgtggccggacccagcaacatggctgtccagggaagaaactacatacctggacccagctaccgacaacaacgtgtctcaaccactgtgactcaaaacaacaacagcgaatttgcttggcctggagcttcttcttgggctctcaatggacgtaatagcttgatgaatcctggacctgctatggccagccacaaagaaggagaggaccgtttctttcctttgtctggatctttaatttttggcaaacaaggtaccggcagagacaacgtggatgcggacaaagtcatgataaccaacgaagaagaaattaaaactactaacccggtagcaacggagtcctatggacaagtggccacaaaccaccagagtgctcaaatacgtcagccacaggaattcgctcaggcccagaccggttgggttcaaaaccaaggaatacttccgggtatggtttggcaggacagagatgtgtacctgcaaggacccatttgggccaaaattcctcacacggacggcaactttcacccttctccgctgatgggagggtttggaatgaagcacccgcctcctcagatcctcatcaaaaacacacctgtacctgcggatcctccaacggccttcaacaaggacaagctgaactctttcatcacccagtattctactggccaagtcagcgtggagatcgagtgggagctgcagaaggaaaacagcaagcgctggaacccggagatccagtacacttccaactattacaagtctaataatgttgaatttgctgttaatactgaaggtgtatatagtgaaccccgccccattggcaccagatacctgactcgtaatctg

SEQ ID NO: 82 - DNA, 2229 bp, Adeno-Associated Virus 9
  source 1..2229: mol_type = other DNA
atggctgccgatggttatcttccagattggctcgaggacaaccttagtgaaggaattcgcgagtggtgggctttgaaacctggagcccctcaacccaaggcaaatcaacaacatcaagacaacgctcgaggtcttgtgcttccgggttacaaataccttggacccggcaacggactcgacaagggggagccggtcaacgcagcagacgcggcggccctcgagcacgacaaggcctacgaccagcagctcaaggccggagacaacccgtacctcaagtacaaccacgccgacgccgagttccaggagcggctcaaagaagatacgtcttttgggggcaacctcgggcgagcagtcttccaggccaaaaagaggcttcttgaacctcttggtctggttgaggaagcggctaagacggctcctggaaagaagaggcctgtagagcagtctcctcaggaaccggactcctccgcgggtattggcaaatcgggtgcacagcccgctaaaaagagactcaatttcggtcagactggcgacacagagtcagtcccagaccctcaaccaatcggagaacctcccgcagccccctcaggtgtgggatctcttacaatggcttcaggtggtggcgcaccagtggcagacaataacgaaggtgccgatggagtgggtagttcctcgggaaattggcattgcgattcccaatggctgggggacagagtcatcaccaccagcacccgaacctgggccctgcccacctacaacaatcacctctacaagcaaatctccaacagcacatctggaggatcttcaaatgacaacgcctacttcggctacagcaccccctgggggtattttgacttcaacagattccactgccacttctcaccacgtgactggcagcgactcatcaacaacaactggggattccggcctaagcgactcaacttcaagctcttcaacattcaggtcaaagaggttacggacaacaatggagtcaagaccatcgccaataaccttaccagcacggtccaggtcttcacggactcagactatcagctcccgtacgtgctcgggtcggctcacgagggctgcctcccgccgttcccagcggacgttttcatgattcctcagtacgggtatctgacgcttaatgatggaagccaggccgtgggtcgttcgtccttttactgcctggaatatttcccgtcgcaaatgctaagaacgggtaacaacttccagttcagctacgagtttgagaacgtacctttccatagcagctacgctcacagccaaagcctggaccgactaatgaatccactcatcgaccaatacttgtactatctctctagaactattaacggttctggacagaatcaacaaacgctaaaattcagtgtggccggacccagcaacatggctgtccagggaagaaactacatacctggacccagctaccgacaacaacgtgtctcaaccactgtgactcaaaacaacaacagcgaatttgcttggcctggagcttcttcttgggctctcaatggacgtaatagcttgatgaatcctggacctgctatggccagccacaaagaaggagaggaccgtttctttcctttgtctggatctttaatttttggcaaacaaggtaccggcagagacaacgtggatgcggacaaagtcatgataaccaacgaagaagaaattaaaactactaacccggtagcaacggagtcctatggacaagtggccacaaaccaccagagtgcacaaattcggcaaccacaagagttcgctcaagctcagaccggttgggttcaaaaccaaggaatacttccgggtatggtttggcaggacagagatgtgtacctgcaaggacccatttgggccaaaattcctcacacggacggcaactttcacccttctccgctgatgggagggtttggaatgaagcacccgcctcctcagatcctcatcaaaaacacacctgtacctgcggatcctccaacggccttcaacaaggacaagctgaactctttcatcacccagtattctactggccaagtcagcgtggagatcgagtgggagctgcagaaggaaaacagcaagcgctggaacccggagatccagtacacttccaactattacaagtctaataatgttgaatttgctgttaatactgaaggtgtatatagtgaaccccgccccattggcaccagatacctgactcgtaatctg

SEQ ID NO: 83 - DNA, 2229 bp, Adeno-Associated Virus 9
  source 1..2229: mol_type = other DNA
atggctgccgatggttatcttccagattggctcgaggacaaccttagtgaaggaattcgcgagtggtgggctttgaaacctggagcccctcaacccaaggcaaatcaacaacatcaagacaacgctcgaggtcttgtgcttccgggttacaaataccttggacccggcaacggactcgacaagggggagccggtcaacgcagcagacgcggcggccctcgagcacgacaaggcctacgaccagcagctcaaggccggagacaacccgtacctcaagtacaaccacgccgacgccgagttccaggagcggctcaaagaagatacgtcttttgggggcaacctcgggcgagcagtcttccaggccaaaaagaggcttcttgaacctcttggtctggttgaggaagcggctaagacggctcctggaaagaagaggcctgtagagcagtctcctcaggaaccggactcctccgcgggtattggcaaatcgggtgcacagcccgctaaaaagagactcaatttcggtcagactggcgacacagagtcagtcccagaccctcaaccaatcggagaacctcccgcagccccctcaggtgtgggatctcttacaatggcttcaggtggtggcgcaccagtggcagacaataacgaaggtgccgatggagtgggtagttcctcgggaaattggcattgcgattcccaatggctgggggacagagtcatcaccaccagcacccgaacctgggccctgcccacctacaacaatcacctctacaagcaaatctccaacagcacatctggaggatcttcaaatgacaacgcctacttcggctacagcaccccctgggggtattttgacttcaacagattccactgccacttctcaccacgtgactggcagcgactcatcaacaacaactggggattccggcctaagcgactcaacttcaagctcttcaacattcaggtcaaagaggttacggacaacaatggagtcaagaccatcgccaataaccttaccagcacggtccaggtcttcacggactcagactatcagctcccgtacgtgctcgggtcggctcacgagggctgcctcccgccgttcccagcggacgttttcatgattcctcagtacgggtatctgacgcttaatgatggaagccaggccgtgggtcgttcgtccttttactgcctggaatatttcccgtcgcaaatgctaagaacgggtaacaacttccagttcagctacgagtttgagaacgtacctttccatagcagctacgctcacagccaaagcctggaccgactaatgaatccactcatcgaccaatacttgtactatctctctagaactattaacggttctggacagaatcaacaaacgctaaaattcagtgtggccggacccagcaacatggctgtccagggaagaaactacatacctggacccagctaccgacaacaacgtgtctcaaccactgtgactcaaaacaacaacagcgaatttgcttggcctggagcttcttcttgggctctcaatggacgtaatagcttgatgaatcctggacctgctatggccagccacaaagaaggagaggaccgtttctttcctttgtctggatctttaatttttggcaaacaaggtaccggcagagacaacgtggatgcggacaaagtcatgataaccaacgaagaagaaattaaaactactaacccggtagcaacggagtcctatggacaagtggccacaaaccaccagagtgcccagatccgccagcctcaggaatttgcacaggcacaaaccggttgggttcaaaaccaaggaatacttccgggtatggtttggcaggacagagatgtgtacctgcaaggacccatttgggccaaaattcctcacacggacggcaactttcacccttctccgctgatgggagggtttggaatgaagcacccgcctcctcagatcctcatcaaaaacacacctgtacctgcggatcctccaacggccttcaacaaggacaagctgaactctttcatcacccagtattctactggccaagtcagcgtggagatcgagtgggagctgcagaaggaaaacagcaagcgctggaacccggagatccagtacacttccaactattacaagtctaataatgttgaatttgctgttaatactgaaggtgtatatagtgaaccccgccccattggcaccagatacctgactcgtaatctg

SEQ ID NO: 84 - DNA, 2229 bp, Adeno-Associated Virus 9
  source 1..2229: mol_type = other DNA
atggctgccgatggttatcttccagattggctcgaggacaaccttagtgaaggaattcgcgagtggtgggctttgaaacctggagcccctcaacccaaggcaaatcaacaacatcaagacaacgctcgaggtcttgtgcttccgggttacaaataccttggacccggcaacggactcgacaagggggagccggtcaacgcagcagacgcggcggccctcgagcacgacaaggcctacgaccagcagctcaaggccggagacaacccgtacctcaagtacaaccacgccgacgccgagttccaggagcggctcaaagaagatacgtcttttgggggcaacctcgggcgagcagtcttccaggccaaaaagaggcttcttgaacctcttggtctggttgaggaagcggctaagacggctcctggaaagaagaggcctgtagagcagtctcctcaggaaccggactcctccgcgggtattggcaaatcgggtgcacagcccgctaaaaagagactcaatttcggtcagactggcgacacagagtcagtcccagaccctcaaccaatcggagaacctcccgcagccccctcaggtgtgggatctcttacaatggcttcaggtggtggcgcaccagtggcagacaataacgaaggtgccgatggagtgggtagttcctcgggaaattggcattgcgattcccaatggctgggggacagagtcatcaccaccagcacccgaacctgggccctgcccacctacaacaatcacctctacaagcaaatctccaacagcacatctggaggatcttcaaatgacaacgcctacttcggctacagcaccccctgggggtattttgacttcaacagattccactgccacttctcaccacgtgactggcagcgactcatcaacaacaactggggattccggcctaagcgactcaacttcaagctcttcaacattcaggtcaaagaggttacggacaacaatggagtcaagaccatcgccaataaccttaccagcacggtccaggtcttcacggactcagactatcagctcccgtacgtgctcgggtcggctcacgagggctgcctcccgccgttcccagcggacgttttcatgattcctcagtacgggtatctgacgcttaatgatggaagccaggccgtgggtcgttcgtccttttactgcctggaatatttcccgtcgcaaatgctaagaacgggtaacaacttccagttcagctacgagtttgagaacgtacctttccatagcagctacgctcacagccaaagcctggaccgactaatgaatccactcatcgaccaatacttgtactatctctctagaactattaacggttctggacagaatcaacaaacgctaaaattcagtgtggccggacccagcaacatggctgtccagggaagaaactacatacctggacccagctaccgacaacaacgtgtctcaaccactgtgactcaaaacaacaacagcgaatttgcttggcctggagcttcttcttgggctctcaatggacgtaatagcttgatgaatcctggacctgctatggccagccacaaagaaggagaggaccgtttctttcctttgtctggatctttaatttttggcaaacaaggtaccggcagagacaacgtggatgcggacaaagtcatgataaccaacgaagaagaaattaaaactactaacccggtagcaacggagtcctatggacaagtggccacaaaccaccagagtgcacagataagacaacctcaggaatttgcgcaggcacaaaccggttgggttcaaaaccaaggaatacttccgggtatggtttggcaggacagagatgtgtacctgcaaggacccatttgggccaaaattcctcacacggacggcaactttcacccttctccgctgatgggagggtttggaatgaagcacccgcctcctcagatcctcatcaaaaacacacctgtacctgcggatcctccaacggccttcaacaaggacaagctgaactctttcatcacccagtattctactggccaagtcagcgtggagatcgagtgggagctgcagaaggaaaacagcaagcgctggaacccggagatccagtacacttccaactattacaagtctaataatgttgaatttgctgttaatactgaaggtgtatatagtgaaccccgccccattggcaccagatacctgactcgtaatctg

SEQ ID NO: 85 - DNA, 2229 bp, Adeno-Associated Virus 9
  source 1..2229: mol_type = other DNA
atggctgccgatggttatcttccagattggctcgaggacaaccttagtgaaggaattcgcgagtggtgggctttgaaacctggagcccctcaacccaaggcaaatcaacaacatcaagacaacgctcgaggtcttgtgcttccgggttacaaataccttggacccggcaacggactcgacaagggggagccggtcaacgcagcagacgcggcggccctcgagcacgacaaggcctacgaccagcagctcaaggccggagacaacccgtacctcaagtacaaccacgccgacgccgagttccaggagcggctcaaagaagatacgtcttttgggggcaacctcgggcgagcagtcttccaggccaaaaagaggcttcttgaacctcttggtctggttgaggaagcggctaagacggctcctggaaagaagaggcctgtagagcagtctcctcaggaaccggactcctccgcgggtattggcaaatcgggtgcacagcccgctaaaaagagactcaatttcggtcagactggcgacacagagtcagtcccagaccctcaaccaatcggagaacctcccgcagccccctcaggtgtgggatctcttacaatggcttcaggtggtggcgcaccagtggcagacaataacgaaggtgccgatggagtgggtagttcctcgggaaattggcattgcgattcccaatggctgggggacagagtcatcaccaccagcacccgaacctgggccctgcccacctacaacaatcacctctacaagcaaatctccaacagcacatctggaggatcttcaaatgacaacgcctacttcggctacagcaccccctgggggtattttgacttcaacagattccactgccacttctcaccacgtgactggcagcgactcatcaacaacaactggggattccggcctaagcgactcaacttcaagctcttcaacattcaggtcaaagaggttacggacaacaatggagtcaagaccatcgccaataaccttaccagcacggtccaggtcttcacggactcagactatcagctcccgtacgtgctcgggtcggctcacgagggctgcctcccgccgttcccagcggacgttttcatgattcctcagtacgggtatctgacgcttaatgatggaagccaggccgtgggtcgttcgtccttttactgcctggaatatttcccgtcgcaaatgctaagaacgggtaacaacttccagttcagctacgagtttgagaacgtacctttccatagcagctacgctcacagccaaagcctggaccgactaatgaatccactcatcgaccaatacttgtactatctctctagaactattaacggttctggacagaatcaacaaacgctaaaattcagtgtggccggacccagcaacatggctgtccagggaagaaactacatacctggacccagctaccgacaacaacgtgtctcaaccactgtgactcaaaacaacaacagcgaatttgcttggcctggagcttcttcttgggctctcaatggacgtaatagcttgatgaatcctggacctgctatggccagccacaaagaaggagaggaccgtttctttcctttgtctggatctttaatttttggcaaacaaggtaccggcagagacaacgtggatgcggacaaagtcatgataaccaacgaagaagaaattaaaactactaacccggtagcaacggagtcctatggacaagtggccacaaaccaccagagtgcccaaattcgtcagccccaagagttcgcccaagctcagaccggttgggttcaaaaccaaggaatacttccgggtatggtttggcaggacagagatgtgtacctgcaaggacccatttgggccaaaattcctcacacggacggcaactttcacccttctccgctgatgggagggtttggaatgaagcacccgcctcctcagatcctcatcaaaaacacacctgtacctgcggatcctccaacggccttcaacaaggacaagctgaactctttcatcacccagtattctactggccaagtcagcgtggagatcgagtgggagctgcagaaggaaaacagcaagcgctggaacccggagatccagtacacttccaactattacaagtctaataatgttgaatttgctgttaatactgaaggtgtatatagtgaaccccgccccattggcaccagatacctgactcgtaatctg

SEQ ID NO: 86 - DNA, 2229 bp, Adeno-Associated Virus 9
  source 1..2229: mol_type = other DNA
atggctgccgatggttatcttccagattggctcgaggacaaccttagtgaaggaattcgcgagtggtgggctttgaaacctggagcccctcaacccaaggcaaatcaacaacatcaagacaacgctcgaggtcttgtgcttccgggttacaaataccttggacccggcaacggactcgacaagggggagccggtcaacgcagcagacgcggcggccctcgagcacgacaaggcctacgaccagcagctcaaggccggagacaacccgtacctcaagtacaaccacgccgacgccgagttccaggagcggctcaaagaagatacgtcttttgggggcaacctcgggcgagcagtcttccaggccaaaaagaggcttcttgaacctcttggtctggttgaggaagcggctaagacggctcctggaaagaagaggcctgtagagcagtctcctcaggaaccggactcctccgcgggtattggcaaatcgggtgcacagcccgctaaaaagagactcaatttcggtcagactggcgacacagagtcagtcccagaccctcaaccaatcggagaacctcccgcagccccctcaggtgtgggatctcttacaatggcttcaggtggtggcgcaccagtggcagacaataacgaaggtgccgatggagtgggtagttcctcgggaaattggcattgcgattcccaatggctgggggacagagtcatcaccaccagcacccgaacctgggccctgcccacctacaacaatcacctctacaagcaaatctccaacagcacatctggaggatcttcaaatgacaacgcctacttcggctacagcaccccctgggggtattttgacttcaacagattccactgccacttctcaccacgtgactggcagcgactcatcaacaacaactggggattccggcctaagcgactcaacttcaagctcttcaacattcaggtcaaagaggttacggacaacaatggagtcaagaccatcgccaataaccttaccagcacggtccaggtcttcacggactcagactatcagctcccgtacgtgctcgggtcggctcacgagggctgcctcccgccgttcccagcggacgttttcatgattcctcagtacgggtatctgacgcttaatgatggaagccaggccgtgggtcgttcgtccttttactgcctggaatatttcccgtcgcaaatgctaagaacgggtaacaacttccagttcagctacgagtttgagaacgtacctttccatagcagctacgctcacagccaaagcctggaccgactaatgaatccactcatcgaccaatacttgtactatctctctagaactattaacggttctggacagaatcaacaaacgctaaaattcagtgtggccggacccagcaacatggctgtccagggaagaaactacatacctggacccagctaccgacaacaacgtgtctcaaccactgtgactcaaaacaacaacagcgaatttgcttggcctggagcttcttcttgggctctcaatggacgtaatagcttgatgaatcctggacctgctatggccagccacaaagaaggagaggaccgtttctttcctttgtctggatctttaatttttggcaaacaaggtaccggcagagacaacgtggatgcggacaaagtcatgataaccaacgaagaagaaattaaaactactaacccggtagcaacggagtcctatggacaagtggccacaaaccaccagagtgcacagattcgacaaccccaagagtttgcccaagcacaaaccggttgggttcaaaaccaaggaatacttccgggtatggtttggcaggacagagatgtgtacctgcaaggacccatttgggccaaaattcctcacacggacggcaactttcacccttctccgctgatgggagggtttggaatgaagcacccgcctcctcagatcctcatcaaaaacacacctgtacctgcggatcctccaacggccttcaacaaggacaagctgaactctttcatcacccagtattctactggccaagtcagcgtggagatcgagtgggagctgcagaaggaaaacagcaagcgctggaacccggagatccagtacacttccaactattacaagtctaataatgttgaatttgctgttaatactgaaggtgtatatagtgaaccccgccccattggcaccagatacctgactcgtaatctg

SEQ ID NO: 87 - DNA, 2229 bp, Adeno-Associated Virus 9
  source 1..2229: mol_type = other DNA
atggctgccgatggttatcttccagattggctcgaggacaaccttagtgaaggaattcgcgagtggtgggctttgaaacctggagcccctcaacccaaggcaaatcaacaacatcaagacaacgctcgaggtcttgtgcttccgggttacaaataccttggacccggcaacggactcgacaagggggagccggtcaacgcagcagacgcggcggccctcgagcacgacaaggcctacgaccagcagctcaaggccggagacaacccgtacctcaagtacaaccacgccgacgccgagttccaggagcggctcaaagaagatacgtcttttgggggcaacctcgggcgagcagtcttccaggccaaaaagaggcttcttgaacctcttggtctggttgaggaagcggctaagacggctcctggaaagaagaggcctgtagagcagtctcctcaggaaccggactcctccgcgggtattggcaaatcgggtgcacagcccgctaaaaagagactcaatttcggtcagactggcgacacagagtcagtcccagaccctcaaccaatcggagaacctcccgcagccccctcaggtgtgggatctcttacaatggcttcaggtggtggcgcaccagtggcagacaataacgaaggtgccgatggagtgggtagttcctcgggaaattggcattgcgattcccaatggctgggggacagagtcatcaccaccagcacccgaacctgggccctgcccacctacaacaatcacctctacaagcaaatctccaacagcacatctggaggatcttcaaatgacaacgcctacttcggctacagcaccccctgggggtattttgacttcaacagattccactgccacttctcaccacgtgactggcagcgactcatcaacaacaactggggattccggcctaagcgactcaacttcaagctcttcaacattcaggtcaaagaggttacggacaacaatggagtcaagaccatcgccaataaccttaccagcacggtccaggtcttcacggactcagactatcagctcccgtacgtgctcgggtcggctcacgagggctgcctcccgccgttcccagcggacgttttcatgattcctcagtacgggtatctgacgcttaatgatggaagccaggccgtgggtcgttcgtccttttactgcctggaatatttcccgtcgcaaatgctaagaacgggtaacaacttccagttcagctacgagtttgagaacgtacctttccatagcagctacgctcacagccaaagcctggaccgactaatgaatccactcatcgaccaatacttgtactatctctctagaactattaacggttctggacagaatcaacaaacgctaaaattcagtgtggccggacccagcaacatggctgtccagggaagaaactacatacctggacccagctaccgacaacaacgtgtctcaaccactgtgactcaaaacaacaacagcgaatttgcttggcctggagcttcttcttgggctctcaatggacgtaatagcttgatgaatcctggacctgctatggccagccacaaagaaggagaggaccgtttctttcctttgtctggatctttaatttttggcaaacaaggtaccggcagagacaacgtggatgcggacaaagtcatgataaccaacgaagaagaaattaaaactactaacccggtagcaacggagtcctatggacaagtggccacaaaccaccagagtgctcagattagacaacctcaggagtttgcgcaagcgcaaaccggttgggttcaaaaccaaggaatacttccgggtatggtttggcaggacagagatgtgtacctgcaaggacccatttgggccaaaattcctcacacggacggcaactttcacccttctccgctgatgggagggtttggaatgaagcacccgcctcctcagatcctcatcaaaaacacacctgtacctgcggatcctccaacggccttcaacaaggacaagctgaactctttcatcacccagtattctactggccaagtcagcgtggagatcgagtgggagctgcagaaggaaaacagcaagcgctggaacccggagatccagtacacttccaactattacaagtctaataatgttgaatttgctgttaatactgaaggtgtatatagtgaaccccgccccattggcaccagatacctgactcgtaatctg

SEQ ID NO: 88 - DNA, 2229 bp, Adeno-Associated Virus 9
  source 1..2229: mol_type = other DNA
atggctgccgatggttatcttccagattggctcgaggacaaccttagtgaaggaattcgcgagtggtgggctttgaaacctggagcccctcaacccaaggcaaatcaacaacatcaagacaacgctcgaggtcttgtgcttccgggttacaaataccttggacccggcaacggactcgacaagggggagccggtcaacgcagcagacgcggcggccctcgagcacgacaaggcctacgaccagcagctcaaggccggagacaacccgtacctcaagtacaaccacgccgacgccgagttccaggagcggctcaaagaagatacgtcttttgggggcaacctcgggcgagcagtcttccaggccaaaaagaggcttcttgaacctcttggtctggttgaggaagcggctaagacggctcctggaaagaagaggcctgtagagcagtctcctcaggaaccggactcctccgcgggtattggcaaatcgggtgcacagcccgctaaaaagagactcaatttcggtcagactggcgacacagagtcagtcccagaccctcaaccaatcggagaacctcccgcagccccctcaggtgtgggatctcttacaatggcttcaggtggtggcgcaccagtggcagacaataacgaaggtgccgatggagtgggtagttcctcgggaaattggcattgcgattcccaatggctgggggacagagtcatcaccaccagcacccgaacctgggccctgcccacctacaacaatcacctctacaagcaaatctccaacagcacatctggaggatcttcaaatgacaacgcctacttcggctacagcaccccctgggggtattttgacttcaacagattccactgccacttctcaccacgtgactggcagcgactcatcaacaacaactggggattccggcctaagcgactcaacttcaagctcttcaacattcaggtcaaagaggttacggacaacaatggagtcaagaccatcgccaataaccttaccagcacggtccaggtcttcacggactcagactatcagctcccgtacgtgctcgggtcggctcacgagggctgcctcccgccgttcccagcggacgttttcatgattcctcagtacgggtatctgacgcttaatgatggaagccaggccgtgggtcgttcgtccttttactgcctggaatatttcccgtcgcaaatgctaagaacgggtaacaacttccagttcagctacgagtttgagaacgtacctttccatagcagctacgctcacagccaaagcctggaccgactaatgaatccactcatcgaccaatacttgtactatctctctagaactattaacggttctggacagaatcaacaaacgctaaaattcagtgtggccggacccagcaacatggctgtccagggaagaaactacatacctggacccagctaccgacaacaacgtgtctcaaccactgtgactcaaaacaacaacagcgaatttgcttggcctggagcttcttcttgggctctcaatggacgtaatagcttgatgaatcctggacctgctatggccagccacaaagaaggagaggaccgtttctttcctttgtctggatctttaatttttggcaaacaaggtaccggcagagacaacgtggatgcggacaaagtcatgataaccaacgaagaagaaattaaaactactaacccggtagcaacggagtcctatggacaagtggccacaaaccaccagagtgcgcaaatccgccagccgcaagaattcgcacaggctcagaccggttgggttcaaaaccaaggaatacttccgggtatggtttggcaggacagagatgtgtacctgcaaggacccatttgggccaaaattcctcacacggacggcaactttcacccttctccgctgatgggagggtttggaatgaagcacccgcctcctcagatcctcatcaaaaacacacctgtacctgcggatcctccaacggccttcaacaaggacaagctgaactctttcatcacccagtattctactggccaagtcagcgtggagatcgagtgggagctgcagaaggaaaacagcaagcgctggaacccggagatccagtacacttccaactattacaagtctaataatgttgaatttgctgttaatactgaaggtgtatatagtgaaccccgccccattggcaccagatacctgactcgtaatctg

SEQ ID NO: 89 - DNA, 2229 bp, Adeno-Associated Virus 9
  source 1..2229: mol_type = other DNA
atggctgccgatggttatcttccagattggctcgaggacaaccttagtgaaggaattcgcgagtggtgggctttgaaacctggagcccctcaacccaaggcaaatcaacaacatcaagacaacgctcgaggtcttgtgcttccgggttacaaataccttggacccggcaacggactcgacaagggggagccggtcaacgcagcagacgcggcggccctcgagcacgacaaggcctacgaccagcagctcaaggccggagacaacccgtacctcaagtacaaccacgccgacgccgagttccaggagcggctcaaagaagatacgtcttttgggggcaacctcgggcgagcagtcttccaggccaaaaagaggcttcttgaacctcttggtctggttgaggaagcggctaagacggctcctggaaagaagaggcctgtagagcagtctcctcaggaaccggactcctccgcgggtattggcaaatcgggtgcacagcccgctaaaaagagactcaatttcggtcagactggcgacacagagtcagtcccagaccctcaaccaatcggagaacctcccgcagccccctcaggtgtgggatctcttacaatggcttcaggtggtggcgcaccagtggcagacaataacgaaggtgccgatggagtgggtagttcctcgggaaattggcattgcgattcccaatggctgggggacagagtcatcaccaccagcacccgaacctgggccctgcccacctacaacaatcacctctacaagcaaatctccaacagcacatctggaggatcttcaaatgacaacgcctacttcggctacagcaccccctgggggtattttgacttcaacagattccactgccacttctcaccacgtgactggcagcgactcatcaacaacaactggggattccggcctaagcgactcaacttcaagctcttcaacattcaggtcaaagaggttacggacaacaatggagtcaagaccatcgccaataaccttaccagcacggtccaggtcttcacggactcagactatcagctcccgtacgtgctcgggtcggctcacgagggctgcctcccgccgttcccagcggacgttttcatgattcctcagtacgggtatctgacgcttaatgatggaagccaggccgtgggtcgttcgtccttttactgcctggaatatttcccgtcgcaaatgctaagaacgggtaacaacttccagttcagctacgagtttgagaacgtacctttccatagcagctacgctcacagccaaagcctggaccgactaatgaatccactcatcgaccaatacttgtactatctctctagaactattaacggttctggacagaatcaacaaacgctaaaattcagtgtggccggacccagcaacatggctgtccagggaagaaactacatacctggacccagctaccgacaacaacgtgtctcaaccactgtgactcaaaacaacaacagcgaatttgcttggcctggagcttcttcttgggctctcaatggacgtaatagcttgatgaatcctggacctgctatggccagccacaaagaaggagaggaccgtttctttcctttgtctggatctttaatttttggcaaacaaggtaccggcagagacaacgtggatgcggacaaagtcatgataaccaacgaagaagaaattaaaactactaacccggtagcaacggagtcctatggacaagtggccacaaaccaccagagtgcccagattcgtcagccacaagagttcgcacaagcgcagaccggttgggttcaaaaccaaggaatacttccgggtatggtttggcaggacagagatgtgtacctgcaaggacccatttgggccaaaattcctcacacggacggcaactttcacccttctccgctgatgggagggtttggaatgaagcacccgcctcctcagatcctcatcaaaaacacacctgtacctgcggatcctccaacggccttcaacaaggacaagctgaactctttcatcacccagtattctactggccaagtcagcgtggagatcgagtgggagctgcagaaggaaaacagcaagcgctggaacccggagatccagtacacttccaactattacaagtctaataatgttgaatttgctgttaatactgaaggtgtatatagtgaaccccgccccattggcaccagatacctgactcgtaatctg

SEQ ID NO: 90 - DNA, 2229 bp, Adeno-Associated Virus 9
  source 1..2229: mol_type = other DNA
atggctgccgatggttatcttccagattggctcgaggacaaccttagtgaaggaattcgcgagtggtgggctttgaaacctggagcccctcaacccaaggcaaatcaacaacatcaagacaacgctcgaggtcttgtgcttccgggttacaaataccttggacccggcaacggactcgacaagggggagccggtcaacgcagcagacgcggcggccctcgagcacgacaaggcctacgaccagcagctcaaggccggagacaacccgtacctcaagtacaaccacgccgacgccgagttccaggagcggctcaaagaagatacgtcttttgggggcaacctcgggcgagcagtcttccaggccaaaaagaggcttcttgaacctcttggtctggttgaggaagcggctaagacggctcctggaaagaagaggcctgtagagcagtctcctcaggaaccggactcctccgcgggtattggcaaatcgggtgcacagcccgctaaaaagagactcaatttcggtcagactggcgacacagagtcagtcccagaccctcaaccaatcggagaacctcccgcagccccctcaggtgtgggatctcttacaatggcttcaggtggtggcgcaccagtggcagacaataacgaaggtgccgatggagtgggtagttcctcgggaaattggcattgcgattcccaatggctgggggacagagtcatcaccaccagcacccgaacctgggccctgcccacctacaacaatcacctctacaagcaaatctccaacagcacatctggaggatcttcaaatgacaacgcctacttcggctacagcaccccctgggggtattttgacttcaacagattccactgccacttctcaccacgtgactggcagcgactcatcaacaacaactggggattccggcctaagcgactcaacttcaagctcttcaacattcaggtcaaagaggttacggacaacaatggagtcaagaccatcgccaataaccttaccagcacggtccaggtcttcacggactcagactatcagctcccgtacgtgctcgggtcggctcacgagggctgcctcccgccgttcccagcggacgttttcatgattcctcagtacgggtatctgacgcttaatgatggaagccaggccgtgggtcgttcgtccttttactgcctggaatatttcccgtcgcaaatgctaagaacgggtaacaacttccagttcagctacgagtttgagaacgtacctttccatagcagctacgctcacagccaaagcctggaccgactaatgaatccactcatcgaccaatacttgtactatctctctagaactattaacggttctggacagaatcaacaaacgctaaaattcagtgtggccggacccagcaacatggctgtccagggaagaaactacatacctggacccagctaccgacaacaacgtgtctcaaccactgtgactcaaaacaacaacagcgaatttgcttggcctggagcttcttcttgggctctcaatggacgtaatagcttgatgaatcctggacctgctatggccagccacaaagaaggagaggaccgtttctttcctttgtctggatctttaatttttggcaaacaaggtaccggcagagacaacgtggatgcggacaaagtcatgataaccaacgaagaagaaattaaaactactaacccggtagcaacggagtcctatggacaagtggccacaaaccaccagagtgctcaaatacgccaaccccaggaatttgcccaggcccaaaccggttgggttcaaaaccaaggaatacttccgggtatggtttggcaggacagagatgtgtacctgcaaggacccatttgggccaaaattcctcacacggacggcaactttcacccttctccgctgatgggagggtttggaatgaagcacccgcctcctcagatcctcatcaaaaacacacctgtacctgcggatcctccaacggccttcaacaaggacaagctgaactctttcatcacccagtattctactggccaagtcagcgtggagatcgagtgggagctgcagaaggaaaacagcaagcgctggaacccggagatccagtacacttccaactattacaagtctaataatgttgaatttgctgttaatactgaaggtgtatatagtgaaccccgccccattggcaccagatacctgactcgtaatctg

SEQ ID NO: 91 - DNA, 2229 bp, Adeno-Associated Virus 9
  source 1..2229: mol_type = other DNA
atggctgccgatggttatcttccagattggctcgaggacaaccttagtgaaggaattcgcgagtggtgggctttgaaacctggagcccctcaacccaaggcaaatcaacaacatcaagacaacgctcgaggtcttgtgcttccgggttacaaataccttggacccggcaacggactcgacaagggggagccggtcaacgcagcagacgcggcggccctcgagcacgacaaggcctacgaccagcagctcaaggccggagacaacccgtacctcaagtacaaccacgccgacgccgagttccaggagcggctcaaagaagatacgtcttttgggggcaacctcgggcgagcagtcttccaggccaaaaagaggcttcttgaacctcttggtctggttgaggaagcggctaagacggctcctggaaagaagaggcctgtagagcagtctcctcaggaaccggactcctccgcgggtattggcaaatcgggtgcacagcccgctaaaaagagactcaatttcggtcagactggcgacacagagtcagtcccagaccctcaaccaatcggagaacctcccgcagccccctcaggtgtgggatctcttacaatggcttcaggtggtggcgcaccagtggcagacaataacgaaggtgccgatggagtgggtagttcctcgggaaattggcattgcgattcccaatggctgggggacagagtcatcaccaccagcacccgaacctgggccctgcccacctacaacaatcacctctacaagcaaatctccaacagcacatctggaggatcttcaaatgacaacgcctacttcggctacagcaccccctgggggtattttgacttcaacagattccactgccacttctcaccacgtgactggcagcgactcatcaacaacaactggggattccggcctaagcgactcaacttcaagctcttcaacattcaggtcaaagaggttacggacaacaatggagtcaagaccatcgccaataaccttaccagcacggtccaggtcttcacggactcagactatcagctcccgtacgtgctcgggtcggctcacgagggctgcctcccgccgttcccagcggacgttttcatgattcctcagtacgggtatctgacgcttaatgatggaagccaggccgtgggtcgttcgtccttttactgcctggaatatttcccgtcgcaaatgctaagaacgggtaacaacttccagttcagctacgagtttgagaacgtacctttccatagcagctacgctcacagccaaagcctggaccgactaatgaatccactcatcgaccaatacttgtactatctctctagaactattaacggttctggacagaatcaacaaacgctaaaattcagtgtggccggacccagcaacatggctgtccagggaagaaactacatacctggacccagctaccgacaacaacgtgtctcaaccactgtgactcaaaacaacaacagcgaatttgcttggcctggagcttcttcttgggctctcaatggacgtaatagcttgatgaatcctggacctgctatggccagccacaaagaaggagaggaccgtttctttcctttgtctggatctttaatttttggcaaacaaggtaccggcagagacaacgtggatgcggacaaagtcatgataaccaacgaagaagaaattaaaactactaacccggtagcaacggagtcctatggacaagtggccacaaaccaccagagtgcacagatacgcgtaccgaacgaattcgcgcaagctcaaaccggttgggttcaaaaccaaggaatacttccgggtatggtttggcaggacagagatgtgtacctgcaaggacccatttgggccaaaattcctcacacggacggcaactttcacccttctccgctgatgggagggtttggaatgaagcacccgcctcctcagatcctcatcaaaaacacacctgtacctgcggatcctccaacggccttcaacaaggacaagctgaactctttcatcacccagtattctactggccaagtcagcgtggagatcgagtgggagctgcagaaggaaaacagcaagcgctggaacccggagatccagtacacttccaactattacaagtctaataatgttgaatttgctgttaatactgaaggtgtatatagtgaaccccgccccattggcaccagatacctgactcgtaatctg

SEQ ID NO: 92 - DNA, 2229 bp, Adeno-Associated Virus 9
  source 1..2229: mol_type = other DNA
atggctgccgatggttatcttccagattggctcgaggacaaccttagtgaaggaattcgcgagtggtgggctttgaaacctggagcccctcaacccaaggcaaatcaacaacatcaagacaacgctcgaggtcttgtgcttccgggttacaaataccttggacccggcaacggactcgacaagggggagccggtcaacgcagcagacgcggcggccctcgagcacgacaaggcctacgaccagcagctcaaggccggagacaacccgtacctcaagtacaaccacgccgacgccgagttccaggagcggctcaaagaagatacgtcttttgggggcaacctcgggcgagcagtcttccaggccaaaaagaggcttcttgaacctcttggtctggttgaggaagcggctaagacggctcctggaaagaagaggcctgtagagcagtctcctcaggaaccggactcctccgcgggtattggcaaatcgggtgcacagcccgctaaaaagagactcaatttcggtcagactggcgacacagagtcagtcccagaccctcaaccaatcggagaacctcccgcagccccctcaggtgtgggatctcttacaatggcttcaggtggtggcgcaccagtggcagacaataacgaaggtgccgatggagtgggtagttcctcgggaaattggcattgcgattcccaatggctgggggacagagtcatcaccaccagcacccgaacctgggccctgcccacctacaacaatcacctctacaagcaaatctccaacagcacatctggaggatcttcaaatgacaacgcctacttcggctacagcaccccctgggggtattttgacttcaacagattccactgccacttctcaccacgtgactggcagcgactcatcaacaacaactggggattccggcctaagcgactcaacttcaagctcttcaacattcaggtcaaagaggttacggacaacaatggagtcaagaccatcgccaataaccttaccagcacggtccaggtcttcacggactcagactatcagctcccgtacgtgctcgggtcggctcacgagggctgcctcccgccgttcccagcggacgttttcatgattcctcagtacgggtatctgacgcttaatgatggaagccaggccgtgggtcgttcgtccttttactgcctggaatatttcccgtcgcaaatgctaagaacgggtaacaacttccagttcagctacgagtttgagaacgtacctttccatagcagctacgctcacagccaaagcctggaccgactaatgaatccactcatcgaccaatacttgtactatctctctagaactattaacggttctggacagaatcaacaaacgctaaaattcagtgtggccggacccagcaacatggctgtccagggaagaaactacatacctggacccagctaccgacaacaacgtgtctcaaccactgtgactcaaaacaacaacagcgaatttgcttggcctggagcttcttcttgggctctcaatggacgtaatagcttgatgaatcctggacctgctatggccagccacaaagaaggagaggaccgtttctttcctttgtctggatctttaatttttggcaaacaaggtaccggcagagacaacgtggatgcggacaaagtcatgataaccaacgaagaagaaattaaaactactaacccggtagcaacggagtcctatggacaagtggccacaaaccaccagagtgctcaaataagggtcccgaacgagtttgcgcaagctcaaaccggttgggttcaaaaccaaggaatacttccgggtatggtttggcaggacagagatgtgtacctgcaaggacccatttgggccaaaattcctcacacggacggcaactttcacccttctccgctgatgggagggtttggaatgaagcacccgcctcctcagatcctcatcaaaaacacacctgtacctgcggatcctccaacggccttcaacaaggacaagctgaactctttcatcacccagtattctactggccaagtcagcgtggagatcgagtgggagctgcagaaggaaaacagcaagcgctggaacccggagatccagtacacttccaactattacaagtctaataatgttgaatttgctgttaatactgaaggtgtatatagtgaaccccgccccattggcaccagatacctgactcgtaatctg

SEQ ID NO: 93 - DNA, 2229 bp, Adeno-Associated Virus 9
  source 1..2229: mol_type = other DNA
atggctgccgatggttatcttccagattggctcgaggacaaccttagtgaaggaattcgcgagtggtgggctttgaaacctggagcccctcaacccaaggcaaatcaacaacatcaagacaacgctcgaggtcttgtgcttccgggttacaaataccttggacccggcaacggactcgacaagggggagccggtcaacgcagcagacgcggcggccctcgagcacgacaaggcctacgaccagcagctcaaggccggagacaacccgtacctcaagtacaaccacgccgacgccgagttccaggagcggctcaaagaagatacgtcttttgggggcaacctcgggcgagcagtcttccaggccaaaaagaggcttcttgaacctcttggtctggttgaggaagcggctaagacggctcctggaaagaagaggcctgtagagcagtctcctcaggaaccggactcctccgcgggtattggcaaatcgggtgcacagcccgctaaaaagagactcaatttcggtcagactggcgacacagagtcagtcccagaccctcaaccaatcggagaacctcccgcagccccctcaggtgtgggatctcttacaatggcttcaggtggtggcgcaccagtggcagacaataacgaaggtgccgatggagtgggtagttcctcgggaaattggcattgcgattcccaatggctgggggacagagtcatcaccaccagcacccgaacctgggccctgcccacctacaacaatcacctctacaagcaaatctccaacagcacatctggaggatcttcaaatgacaacgcctacttcggctacagcaccccctgggggtattttgacttcaacagattccactgccacttctcaccacgtgactggcagcgactcatcaacaacaactggggattccggcctaagcgactcaacttcaagctcttcaacattcaggtcaaagaggttacggacaacaatggagtcaagaccatcgccaataaccttaccagcacggtccaggtcttcacggactcagactatcagctcccgtacgtgctcgggtcggctcacgagggctgcctcccgccgttcccagcggacgttttcatgattcctcagtacgggtatctgacgcttaatgatggaagccaggccgtgggtcgttcgtccttttactgcctggaatatttcccgtcgcaaatgctaagaacgggtaacaacttccagttcagctacgagtttgagaacgtacctttccatagcagctacgctcacagccaaagcctggaccgactaatgaatccactcatcgaccaatacttgtactatctctctagaactattaacggttctggacagaatcaacaaacgctaaaattcagtgtggccggacccagcaacatggctgtccagggaagaaactacatacctggacccagctaccgacaacaacgtgtctcaaccactgtgactcaaaacaacaacagcgaatttgcttggcctggagcttcttcttgggctctcaatggacgtaatagcttgatgaatcctggacctgctatggccagccacaaagaaggagaggaccgtttctttcctttgtctggatctttaatttttggcaaacaaggtaccggcagagacaacgtggatgcggacaaagtcatgataaccaacgaagaagaaattaaaactactaacccggtagcaacggagtcctatggacaagtggccacaaaccaccagagtgcacaaatcagggtacccaatgaatttgcacaggctcaaaccggttgggttcaaaaccaaggaatacttccgggtatggtttggcaggacagagatgtgtacctgcaaggacccatttgggccaaaattcctcacacggacggcaactttcacccttctccgctgatgggagggtttggaatgaagcacccgcctcctcagatcctcatcaaaaacacacctgtacctgcggatcctccaacggccttcaacaaggacaagctgaactctttcatcacccagtattctactggccaagtcagcgtggagatcgagtgggagctgcagaaggaaaacagcaagcgctggaacccggagatccagtacacttccaactattacaagtctaataatgttgaatttgctgttaatactgaaggtgtatatagtgaaccccgccccattggcaccagatacctgactcgtaatctg

SEQ ID NO: 94 - DNA, 2229 bp, Adeno-Associated Virus 9
  source 1..2229: mol_type = other DNA
atggctgccgatggttatcttccagattggctcgaggacaaccttagtgaaggaattcgcgagtggtgggctttgaaacctggagcccctcaacccaaggcaaatcaacaacatcaagacaacgctcgaggtcttgtgcttccgggttacaaataccttggacccggcaacggactcgacaagggggagccggtcaacgcagcagacgcggcggccctcgagcacgacaaggcctacgaccagcagctcaaggccggagacaacccgtacctcaagtacaaccacgccgacgccgagttccaggagcggctcaaagaagatacgtcttttgggggcaacctcgggcgagcagtcttccaggccaaaaagaggcttcttgaacctcttggtctggttgaggaagcggctaagacggctcctggaaagaagaggcctgtagagcagtctcctcaggaaccggactcctccgcgggtattggcaaatcgggtgcacagcccgctaaaaagagactcaatttcggtcagactggcgacacagagtcagtcccagaccctcaaccaatcggagaacctcccgcagccccctcaggtgtgggatctcttacaatggcttcaggtggtggcgcaccagtggcagacaataacgaaggtgccgatggagtgggtagttcctcgggaaattggcattgcgattcccaatggctgggggacagagtcatcaccaccagcacccgaacctgggccctgcccacctacaacaatcacctctacaagcaaatctccaacagcacatctggaggatcttcaaatgacaacgcctacttcggctacagcaccccctgggggtattttgacttcaacagattccactgccacttctcaccacgtgactggcagcgactcatcaacaacaactggggattccggcctaagcgactcaacttcaagctcttcaacattcaggtcaaagaggttacggacaacaatggagtcaagaccatcgccaataaccttaccagcacggtccaggtcttcacggactcagactatcagctcccgtacgtgctcgggtcggctcacgagggctgcctcccgccgttcccagcggacgttttcatgattcctcagtacgggtatctgacgcttaatgatggaagccaggccgtgggtcgttcgtccttttactgcctggaatatttcccgtcgcaaatgctaagaacgggtaacaacttccagttcagctacgagtttgagaacgtacctttccatagcagctacgctcacagccaaagcctggaccgactaatgaatccactcatcgaccaatacttgtactatctctctagaactattaacggttctggacagaatcaacaaacgctaaaattcagtgtggccggacccagcaacatggctgtccagggaagaaactacatacctggacccagctaccgacaacaacgtgtctcaaccactgtgactcaaaacaacaacagcgaatttgcttggcctggagcttcttcttgggctctcaatggacgtaatagcttgatgaatcctggacctgctatggccagccacaaagaaggagaggaccgtttctttcctttgtctggatctttaatttttggcaaacaaggtaccggcagagacaacgtggatgcggacaaagtcatgataaccaacgaagaagaaattaaaactactaacccggtagcaacggagtcctatggacaagtggccacaaaccaccagagtgcgcagatccgggtgcctaatgaattcgcacaggcacagaccggttgggttcaaaaccaaggaatacttccgggtatggtttggcaggacagagatgtgtacctgcaaggacccatttgggccaaaattcctcacacggacggcaactttcacccttctccgctgatgggagggtttggaatgaagcacccgcctcctcagatcctcatcaaaaacacacctgtacctgcggatcctccaacggccttcaacaaggacaagctgaactctttcatcacccagtattctactggccaagtcagcgtggagatcgagtgggagctgcagaaggaaaacagcaagcgctggaacccggagatccagtacacttccaactattacaagtctaataatgttgaatttgctgttaatactgaaggtgtatatagtgaaccccgccccattggcaccagatacctgactcgtaatctg

SEQ ID NO: 95 - DNA, 2229 bp, Adeno-Associated Virus 9
  source 1..2229: mol_type = other DNA
atggctgccgatggttatcttccagattggctcgaggacaaccttagtgaaggaattcgcgagtggtgggctttgaaacctggagcccctcaacccaaggcaaatcaacaacatcaagacaacgctcgaggtcttgtgcttccgggttacaaataccttggacccggcaacggactcgacaagggggagccggtcaacgcagcagacgcggcggccctcgagcacgacaaggcctacgaccagcagctcaaggccggagacaacccgtacctcaagtacaaccacgccgacgccgagttccaggagcggctcaaagaagatacgtcttttgggggcaacctcgggcgagcagtcttccaggccaaaaagaggcttcttgaacctcttggtctggttgaggaagcggctaagacggctcctggaaagaagaggcctgtagagcagtctcctcaggaaccggactcctccgcgggtattggcaaatcgggtgcacagcccgctaaaaagagactcaatttcggtcagactggcgacacagagtcagtcccagaccctcaaccaatcggagaacctcccgcagccccctcaggtgtgggatctcttacaatggcttcaggtggtggcgcaccagtggcagacaataacgaaggtgccgatggagtgggtagttcctcgggaaattggcattgcgattcccaatggctgggggacagagtcatcaccaccagcacccgaacctgggccctgcccacctacaacaatcacctctacaagcaaatctccaacagcacatctggaggatcttcaaatgacaacgcctacttcggctacagcaccccctgggggtattttgacttcaacagattccactgccacttctcaccacgtgactggcagcgactcatcaacaacaactggggattccggcctaagcgactcaacttcaagctcttcaacattcaggtcaaagaggttacggacaacaatggagtcaagaccatcgccaataaccttaccagcacggtccaggtcttcacggactcagactatcagctcccgtacgtgctcgggtcggctcacgagggctgcctcccgccgttcccagcggacgttttcatgattcctcagtacgggtatctgacgcttaatgatggaagccaggccgtgggtcgttcgtccttttactgcctggaatatttcccgtcgcaaatgctaagaacgggtaacaacttccagttcagctacgagtttgagaacgtacctttccatagcagctacgctcacagccaaagcctggaccgactaatgaatccactcatcgaccaatacttgtactatctctctagaactattaacggttctggacagaatcaacaaacgctaaaattcagtgtggccggacccagcaacatggctgtccagggaagaaactacatacctggacccagctaccgacaacaacgtgtctcaaccactgtgactcaaaacaacaacagcgaatttgcttggcctggagcttcttcttgggctctcaatggacgtaatagcttgatgaatcctggacctgctatggccagccacaaagaaggagaggaccgtttctttcctttgtctggatctttaatttttggcaaacaaggtaccggcagagacaacgtggatgcggacaaagtcatgataaccaacgaagaagaaattaaaactactaacccggtagcaacggagtcctatggacaagtggccacaaaccaccagagtgcgcagatacgtgtgccgaacgagttcgcccaagcacagaccggttgggttcaaaaccaaggaatacttccgggtatggtttggcaggacagagatgtgtacctgcaaggacccatttgggccaaaattcctcacacggacggcaactttcacccttctccgctgatgggagggtttggaatgaagcacccgcctcctcagatcctcatcaaaaacacacctgtacctgcggatcctccaacggccttcaacaaggacaagctgaactctttcatcacccagtattctactggccaagtcagcgtggagatcgagtgggagctgcagaaggaaaacagcaagcgctggaacccggagatccagtacacttccaactattacaagtctaataatgttgaatttgctgttaatactgaaggtgtatatagtgaaccccgccccattggcaccagatacctgactcgtaatctg

SEQ ID NO: 96 - DNA, 2229 bp, Adeno-Associated Virus 9
  source 1..2229: mol_type = other DNA
atggctgccgatggttatcttccagattggctcgaggacaaccttagtgaaggaattcgcgagtggtgggctttgaaacctggagcccctcaacccaaggcaaatcaacaacatcaagacaacgctcgaggtcttgtgcttccgggttacaaataccttggacccggcaacggactcgacaagggggagccggtcaacgcagcagacgcggcggccctcgagcacgacaaggcctacgaccagcagctcaaggccggagacaacccgtacctcaagtacaaccacgccgacgccgagttccaggagcggctcaaagaagatacgtcttttgggggcaacctcgggcgagcagtcttccaggccaaaaagaggcttcttgaacctcttggtctggttgaggaagcggctaagacggctcctggaaagaagaggcctgtagagcagtctcctcaggaaccggactcctccgcgggtattggcaaatcgggtgcacagcccgctaaaaagagactcaatttcggtcagactggcgacacagagtcagtcccagaccctcaaccaatcggagaacctcccgcagccccctcaggtgtgggatctcttacaatggcttcaggtggtggcgcaccagtggcagacaataacgaaggtgccgatggagtgggtagttcctcgggaaattggcattgcgattcccaatggctgggggacagagtcatcaccaccagcacccgaacctgggccctgcccacctacaacaatcacctctacaagcaaatctccaacagcacatctggaggatcttcaaatgacaacgcctacttcggctacagcaccccctgggggtattttgacttcaacagattccactgccacttctcaccacgtgactggcagcgactcatcaacaacaactggggattccggcctaagcgactcaacttcaagctcttcaacattcaggtcaaagaggttacggacaacaatggagtcaagaccatcgccaataaccttaccagcacggtccaggtcttcacggactcagactatcagctcccgtacgtgctcgggtcggctcacgagggctgcctcccgccgttcccagcggacgttttcatgattcctcagtacgggtatctgacgcttaatgatggaagccaggccgtgggtcgttcgtccttttactgcctggaatatttcccgtcgcaaatgctaagaacgggtaacaacttccagttcagctacgagtttgagaacgtacctttccatagcagctacgctcacagccaaagcctggaccgactaatgaatccactcatcgaccaatacttgtactatctctctagaactattaacggttctggacagaatcaacaaacgctaaaattcagtgtggccggacccagcaacatggctgtccagggaagaaactacatacctggacccagctaccgacaacaacgtgtctcaaccactgtgactcaaaacaacaacagcgaatttgcttggcctggagcttcttcttgggctctcaatggacgtaatagcttgatgaatcctggacctgctatggccagccacaaagaaggagaggaccgtttctttcctttgtctggatctttaatttttggcaaacaaggtaccggcagagacaacgtggatgcggacaaagtcatgataaccaacgaagaagaaattaaaactactaacccggtagcaacggagtcctatggacaagtggccacaaaccaccagagtgcgcaaataagagtaccgaatgagttcgcccaagcccagaccggttgggttcaaaaccaaggaatacttccgggtatggtttggcaggacagagatgtgtacctgcaaggacccatttgggccaaaattcctcacacggacggcaactttcacccttctccgctgatgggagggtttggaatgaagcacccgcctcctcagatcctcatcaaaaacacacctgtacctgcggatcctccaacggccttcaacaaggacaagctgaactctttcatcacccagtattctactggccaagtcagcgtggagatcgagtgggagctgcagaaggaaaacagcaagcgctggaacccggagatccagtacacttccaactattacaagtctaataatgttgaatttgctgttaatactgaaggtgtatatagtgaaccccgccccattggcaccagatacctgactcgtaatctg

SEQ ID NO: 97 - DNA, 2229 bp, Adeno-Associated Virus 9
  source 1..2229: mol_type = other DNA
atggctgccgatggttatcttccagattggctcgaggacaaccttagtgaaggaattcgcgagtggtgggctttgaaacctggagcccctcaacccaaggcaaatcaacaacatcaagacaacgctcgaggtcttgtgcttccgggttacaaataccttggacccggcaacggactcgacaagggggagccggtcaacgcagcagacgcggcggccctcgagcacgacaaggcctacgaccagcagctcaaggccggagacaacccgtacctcaagtacaaccacgccgacgccgagttccaggagcggctcaaagaagatacgtcttttgggggcaacctcgggcgagcagtcttccaggccaaaaagaggcttcttgaacctcttggtctggttgaggaagcggctaagacggctcctggaaagaagaggcctgtagagcagtctcctcaggaaccggactcctccgcgggtattggcaaatcgggtgcacagcccgctaaaaagagactcaatttcggtcagactggcgacacagagtcagtcccagaccctcaaccaatcggagaacctcccgcagccccctcaggtgtgggatctcttacaatggcttcaggtggtggcgcaccagtggcagacaataacgaaggtgccgatggagtgggtagttcctcgggaaattggcattgcgattcccaatggctgggggacagagtcatcaccaccagcacccgaacctgggccctgcccacctacaacaatcacctctacaagcaaatctccaacagcacatctggaggatcttcaaatgacaacgcctacttcggctacagcaccccctgggggtattttgacttcaacagattccactgccacttctcaccacgtgactggcagcgactcatcaacaacaactggggattccggcctaagcgactcaacttcaagctcttcaacattcaggtcaaagaggttacggacaacaatggagtcaagaccatcgccaataaccttaccagcacggtccaggtcttcacggactcagactatcagctcccgtacgtgctcgggtcggctcacgagggctgcctcccgccgttcccagcggacgttttcatgattcctcagtacgggtatctgacgcttaatgatggaagccaggccgtgggtcgttcgtccttttactgcctggaatatttcccgtcgcaaatgctaagaacgggtaacaacttccagttcagctacgagtttgagaacgtacctttccatagcagctacgctcacagccaaagcctggaccgactaatgaatccactcatcgaccaatacttgtactatctctctagaactattaacggttctggacagaatcaacaaacgctaaaattcagtgtggccggacccagcaacatggctgtccagggaagaaactacatacctggacccagctaccgacaacaacgtgtctcaaccactgtgactcaaaacaacaacagcgaatttgcttggcctggagcttcttcttgggctctcaatggacgtaatagcttgatgaatcctggacctgctatggccagccacaaagaaggagaggaccgtttctttcctttgtctggatctttaatttttggcaaacaaggtaccggcagagacaacgtggatgcggacaaagtcatgataaccaacgaagaagaaattaaaactactaacccggtagcaacggagtcctatggacaagtggccacaaaccaccagagtgcccaaatccgagtgccaaacgagtttgctcaggcacagaccggttgggttcaaaaccaaggaatacttccgggtatggtttggcaggacagagatgtgtacctgcaaggacccatttgggccaaaattcctcacacggacggcaactttcacccttctccgctgatgggagggtttggaatgaagcacccgcctcctcagatcctcatcaaaaacacacctgtacctgcggatcctccaacggccttcaacaaggacaagctgaactctttcatcacccagtattctactggccaagtcagcgtggagatcgagtgggagctgcagaaggaaaacagcaagcgctggaacccggagatccagtacacttccaactattacaagtctaataatgttgaatttgctgttaatactgaaggtgtatatagtgaaccccgccccattggcaccagatacctgactcgtaatctg

SEQ ID NO: 98 - DNA, 2229 bp, Adeno-Associated Virus 9
  source 1..2229: mol_type = other DNA
atggctgccgatggttatcttccagattggctcgaggacaaccttagtgaaggaattcgcgagtggtgggctttgaaacctggagcccctcaacccaaggcaaatcaacaacatcaagacaacgctcgaggtcttgtgcttccgggttacaaataccttggacccggcaacggactcgacaagggggagccggtcaacgcagcagacgcggcggccctcgagcacgacaaggcctacgaccagcagctcaaggccggagacaacccgtacctcaagtacaaccacgccgacgccgagttccaggagcggctcaaagaagatacgtcttttgggggcaacctcgggcgagcagtcttccaggccaaaaagaggcttcttgaacctcttggtctggttgaggaagcggctaagacggctcctggaaagaagaggcctgtagagcagtctcctcaggaaccggactcctccgcgggtattggcaaatcgggtgcacagcccgctaaaaagagactcaatttcggtcagactggcgacacagagtcagtcccagaccctcaaccaatcggagaacctcccgcagccccctcaggtgtgggatctcttacaatggcttcaggtggtggcgcaccagtggcagacaataacgaaggtgccgatggagtgggtagttcctcgggaaattggcattgcgattcccaatggctgggggacagagtcatcaccaccagcacccgaacctgggccctgcccacctacaacaatcacctctacaagcaaatctccaacagcacatctggaggatcttcaaatgacaacgcctacttcggctacagcaccccctgggggtattttgacttcaacagattccactgccacttctcaccacgtgactggcagcgactcatcaacaacaactggggattccggcctaagcgactcaacttcaagctcttcaacattcaggtcaaagaggttacggacaacaatggagtcaagaccatcgccaataaccttaccagcacggtccaggtcttcacggactcagactatcagctcccgtacgtgctcgggtcggctcacgagggctgcctcccgccgttcccagcggacgttttcatgattcctcagtacgggtatctgacgcttaatgatggaagccaggccgtgggtcgttcgtccttttactgcctggaatatttcccgtcgcaaatgctaagaacgggtaacaacttccagttcagctacgagtttgagaacgtacctttccatagcagctacgctcacagccaaagcctggaccgactaatgaatccactcatcgaccaatacttgtactatctctctagaactattaacggttctggacagaatcaacaaacgctaaaattcagtgtggccggacccagcaacatggctgtccagggaagaaactacatacctggacccagctaccgacaacaacgtgtctcaaccactgtgactcaaaacaacaacagcgaatttgcttggcctggagcttcttcttgggctctcaatggacgtaatagcttgatgaatcctggacctgctatggccagccacaaagaaggagaggaccgtttctttcctttgtctggatctttaatttttggcaaacaaggtaccggcagagacaacgtggatgcggacaaagtcatgataaccaacgaagaagaaattaaaactactaacccggtagcaacggagtcctatggacaagtggccacaaaccaccagagtgctcaaatccgagtccctaatgagtttgcccaggcgcagaccggttgggttcaaaaccaaggaatacttccgggtatggtttggcaggacagagatgtgtacctgcaaggacccatttgggccaaaattcctcacacggacggcaactttcacccttctccgctgatgggagggtttggaatgaagcacccgcctcctcagatcctcatcaaaaacacacctgtacctgcggatcctccaacggccttcaacaaggacaagctgaactctttcatcacccagtattctactggccaagtcagcgtggagatcgagtgggagctgcagaaggaaaacagcaagcgctggaacccggagatccagtacacttccaactattacaagtctaataatgttgaatttgctgttaatactgaaggtgtatatagtgaaccccgccccattggcaccagatacctgactcgtaatctg

SEQ ID NO: 99 - DNA, 2229 bp, Adeno-Associated Virus 9
  source 1..2229: mol_type = other DNA
atggctgccgatggttatcttccagattggctcgaggacaaccttagtgaaggaattcgcgagtggtgggctttgaaacctggagcccctcaacccaaggcaaatcaacaacatcaagacaacgctcgaggtcttgtgcttccgggttacaaataccttggacccggcaacggactcgacaagggggagccggtcaacgcagcagacgcggcggccctcgagcacgacaaggcctacgaccagcagctcaaggccggagacaacccgtacctcaagtacaaccacgccgacgccgagttccaggagcggctcaaagaagatacgtcttttgggggcaacctcgggcgagcagtcttccaggccaaaaagaggcttcttgaacctcttggtctggttgaggaagcggctaagacggctcctggaaagaagaggcctgtagagcagtctcctcaggaaccggactcctccgcgggtattggcaaatcgggtgcacagcccgctaaaaagagactcaatttcggtcagactggcgacacagagtcagtcccagaccctcaaccaatcggagaacctcccgcagccccctcaggtgtgggatctcttacaatggcttcaggtggtggcgcaccagtggcagacaataacgaaggtgccgatggagtgggtagttcctcgggaaattggcattgcgattcccaatggctgggggacagagtcatcaccaccagcacccgaacctgggccctgcccacctacaacaatcacctctacaagcaaatctccaacagcacatctggaggatcttcaaatgacaacgcctacttcggctacagcaccccctgggggtattttgacttcaacagattccactgccacttctcaccacgtgactggcagcgactcatcaacaacaactggggattccggcctaagcgactcaacttcaagctcttcaacattcaggtcaaagaggttacggacaacaatggagtcaagaccatcgccaataaccttaccagcacggtccaggtcttcacggactcagactatcagctcccgtacgtgctcgggtcggctcacgagggctgcctcccgccgttcccagcggacgttttcatgattcctcagtacgggtatctgacgcttaatgatggaagccaggccgtgggtcgttcgtccttttactgcctggaatatttcccgtcgcaaatgctaagaacgggtaacaacttccagttcagctacgagtttgagaacgtacctttccatagcagctacgctcacagccaaagcctggaccgactaatgaatccactcatcgaccaatacttgtactatctctctagaactattaacggttctggacagaatcaacaaacgctaaaattcagtgtggccggacccagcaacatggctgtccagggaagaaactacatacctggacccagctaccgacaacaacgtgtctcaaccactgtgactcaaaacaacaacagcgaatttgcttggcctggagcttcttcttgggctctcaatggacgtaatagcttgatgaatcctggacctgctatggccagccacaaagaaggagaggaccgtttctttcctttgtctggatctttaatttttggcaaacaaggtaccggcagagacaacgtggatgcggacaaagtcatgataaccaacgaagaagaaattaaaactactaacccggtagcaacggagtcctatggacaagtggccacaaaccaccagagtgcacagataagggtacccaatgaattcgcgcaagcgcaaaccggttgggttcaaaaccaaggaatacttccgggtatggtttggcaggacagagatgtgtacctgcaaggacccatttgggccaaaattcctcacacggacggcaactttcacccttctccgctgatgggagggtttggaatgaagcacccgcctcctcagatcctcatcaaaaacacacctgtacctgcggatcctccaacggccttcaacaaggacaagctgaactctttcatcacccagtattctactggccaagtcagcgtggagatcgagtgggagctgcagaaggaaaacagcaagcgctggaacccggagatccagtacacttccaactattacaagtctaataatgttgaatttgctgttaatactgaaggtgtatatagtgaaccccgccccattggcaccagatacctgactcgtaatctg

SEQ ID NO: 100 - DNA, 2229 bp, Adeno-Associated Virus 9
  source 1..2229: mol_type = other DNA
atggctgccgatggttatcttccagattggctcgaggacaaccttagtgaaggaattcgcgagtggtgggctttgaaacctggagcccctcaacccaaggcaaatcaacaacatcaagacaacgctcgaggtcttgtgcttccgggttacaaataccttggacccggcaacggactcgacaagggggagccggtcaacgcagcagacgcggcggccctcgagcacgacaaggcctacgaccagcagctcaaggccggagacaacccgtacctcaagtacaaccacgccgacgccgagttccaggagcggctcaaagaagatacgtcttttgggggcaacctcgggcgagcagtcttccaggccaaaaagaggcttcttgaacctcttggtctggttgaggaagcggctaagacggctcctggaaagaagaggcctgtagagcagtctcctcaggaaccggactcctccgcgggtattggcaaatcgggtgcacagcccgctaaaaagagactcaatttcggtcagactggcgacacagagtcagtcccagaccctcaaccaatcggagaacctcccgcagccccctcaggtgtgggatctcttacaatggcttcaggtggtggcgcaccagtggcagacaataacgaaggtgccgatggagtgggtagttcctcgggaaattggcattgcgattcccaatggctgggggacagagtcatcaccaccagcacccgaacctgggccctgcccacctacaacaatcacctctacaagcaaatctccaacagcacatctggaggatcttcaaatgacaacgcctacttcggctacagcaccccctgggggtattttgacttcaacagattccactgccacttctcaccacgtgactggcagcgactcatcaacaacaactggggattccggcctaagcgactcaacttcaagctcttcaacattcaggtcaaagaggttacggacaacaatggagtcaagaccatcgccaataaccttaccagcacggtccaggtcttcacggactcagactatcagctcccgtacgtgctcgggtcggctcacgagggctgcctcccgccgttcccagcggacgttttcatgattcctcagtacgggtatctgacgcttaatgatggaagccaggccgtgggtcgttcgtccttttactgcctggaatatttcccgtcgcaaatgctaagaacgggtaacaacttccagttcagctacgagtttgagaacgtacctttccatagcagctacgctcacagccaaagcctggaccgactaatgaatccactcatcgaccaatacttgtactatctctctagaactattaacggttctggacagaatcaacaaacgctaaaattcagtgtggccggacccagcaacatggctgtccagggaagaaactacatacctggacccagctaccgacaacaacgtgtctcaaccactgtgactcaaaacaacaacagcgaatttgcttggcctggagcttcttcttgggctctcaatggacgtaatagcttgatgaatcctggacctgctatggccagccacaaagaaggagaggaccgtttctttcctttgtctggatctttaatttttggcaaacaaggtaccggcagagacaacgtggatgcggacaaagtcatgataaccaacgaagaagaaattaaaactactaacccggtagcaacggagtcctatggacaagtggccacaaaccaccagagtgctcagattcgagtgcccaacgaatttgcgcaggcgcaaaccggttgggttcaaaaccaaggaatacttccgggtatggtttggcaggacagagatgtgtacctgcaaggacccatttgggccaaaattcctcacacggacggcaactttcacccttctccgctgatgggagggtttggaatgaagcacccgcctcctcagatcctcatcaaaaacacacctgtacctgcggatcctccaacggccttcaacaaggacaagctgaactctttcatcacccagtattctactggccaagtcagcgtggagatcgagtgggagctgcagaaggaaaacagcaagcgctggaacccggagatccagtacacttccaactattacaagtctaataatgttgaatttgctgttaatactgaaggtgtatatagtgaaccccgccccattggcaccagatacctgactcgtaatctg

SEQ ID NO: 101 - DNA, 2229 bp, Adeno-Associated Virus 9
  source 1..2229: mol_type = other DNA
atggctgccgatggttatcttccagattggctcgaggacaaccttagtgaaggaattcgcgagtggtgggctttgaaacctggagcccctcaacccaaggcaaatcaacaacatcaagacaacgctcgaggtcttgtgcttccgggttacaaataccttggacccggcaacggactcgacaagggggagccggtcaacgcagcagacgcggcggccctcgagcacgacaaggcctacgaccagcagctcaaggccggagacaacccgtacctcaagtacaaccacgccgacgccgagttccaggagcggctcaaagaagatacgtcttttgggggcaacctcgggcgagcagtcttccaggccaaaaagaggcttcttgaacctcttggtctggttgaggaagcggctaagacggctcctggaaagaagaggcctgtagagcagtctcctcaggaaccggactcctccgcgggtattggcaaatcgggtgcacagcccgctaaaaagagactcaatttcggtcagactggcgacacagagtcagtcccagaccctcaaccaatcggagaacctcccgcagccccctcaggtgtgggatctcttacaatggcttcaggtggtggcgcaccagtggcagacaataacgaaggtgccgatggagtgggtagttcctcgggaaattggcattgcgattcccaatggctgggggacagagtcatcaccaccagcacccgaacctgggccctgcccacctacaacaatcacctctacaagcaaatctccaacagcacatctggaggatcttcaaatgacaacgcctacttcggctacagcaccccctgggggtattttgacttcaacagattccactgccacttctcaccacgtgactggcagcgactcatcaacaacaactggggattccggcctaagcgactcaacttcaagctcttcaacattcaggtcaaagaggttacggacaacaatggagtcaagaccatcgccaataaccttaccagcacggtccaggtcttcacggactcagactatcagctcccgtacgtgctcgggtcggctcacgagggctgcctcccgccgttcccagcggacgttttcatgattcctcagtacgggtatctgacgcttaatgatggaagccaggccgtgggtcgttcgtccttttactgcctggaatatttcccgtcgcaaatgctaagaacgggtaacaacttccagttcagctacgagtttgagaacgtacctttccatagcagctacgctcacagccaaagcctggaccgactaatgaatccactcatcgaccaatacttgtactatctctctagaactattaacggttctggacagaatcaacaaacgctaaaattcagtgtggccggacccagcaacatggctgtccagggaagaaactacatacctggacccagctaccgacaacaacgtgtctcaaccactgtgactcaaaacaacaacagcgaatttgcttggcctggagcttcttcttgggctctcaatggacgtaatagcttgatgaatcctggacctgctatggccagccacaaagaaggagaggaccgtttctttcctttgtctggatctttaatttttggcaaacaaggtaccggcagagacaacgtggatgcggacaaagtcatgataaccaacgaagaagaaattaaaactactaacccggtagcaacggagtcctatggacaagtggccacaaaccaccagagtgcccaaaaaggcccgggatacgaacacgcacaggcacaaaccggttgggttcaaaaccaaggaatacttccgggtatggtttggcaggacagagatgtgtacctgcaaggacccatttgggccaaaattcctcacacggacggcaactttcacccttctccgctgatgggagggtttggaatgaagcacccgcctcctcagatcctcatcaaaaacacacctgtacctgcggatcctccaacggccttcaacaaggacaagctgaactctttcatcacccagtattctactggccaagtcagcgtggagatcgagtgggagctgcagaaggaaaacagcaagcgctggaacccggagatccagtacacttccaactattacaagtctaataatgttgaatttgctgttaatactgaaggtgtatatagtgaaccccgccccattggcaccagatacctgactcgtaatctg

SEQ ID NO: 102 - DNA, 2229 bp, Adeno-Associated Virus 9
  source 1..2229: mol_type = other DNA
atggctgccgatggttatcttccagattggctcgaggacaaccttagtgaaggaattcgcgagtggtgggctttgaaacctggagcccctcaacccaaggcaaatcaacaacatcaagacaacgctcgaggtcttgtgcttccgggttacaaataccttggacccggcaacggactcgacaagggggagccggtcaacgcagcagacgcggcggccctcgagcacgacaaggcctacgaccagcagctcaaggccggagacaacccgtacctcaagtacaaccacgccgacgccgagttccaggagcggctcaaagaagatacgtcttttgggggcaacctcgggcgagcagtcttccaggccaaaaagaggcttcttgaacctcttggtctggttgaggaagcggctaagacggctcctggaaagaagaggcctgtagagcagtctcctcaggaaccggactcctccgcgggtattggcaaatcgggtgcacagcccgctaaaaagagactcaatttcggtcagactggcgacacagagtcagtcccagaccctcaaccaatcggagaacctcccgcagccccctcaggtgtgggatctcttacaatggcttcaggtggtggcgcaccagtggcagacaataacgaaggtgccgatggagtgggtagttcctcgggaaattggcattgcgattcccaatggctgggggacagagtcatcaccaccagcacccgaacctgggccctgcccacctacaacaatcacctctacaagcaaatctccaacagcacatctggaggatcttcaaatgacaacgcctacttcggctacagcaccccctgggggtattttgacttcaacagattccactgccacttctcaccacgtgactggcagcgactcatcaacaacaactggggattccggcctaagcgactcaacttcaagctcttcaacattcaggtcaaagaggttacggacaacaatggagtcaagaccatcgccaataaccttaccagcacggtccaggtcttcacggactcagactatcagctcccgtacgtgctcgggtcggctcacgagggctgcctcccgccgttcccagcggacgttttcatgattcctcagtacgggtatctgacgcttaatgatggaagccaggccgtgggtcgttcgtccttttactgcctggaatatttcccgtcgcaaatgctaagaacgggtaacaacttccagttcagctacgagtttgagaacgtacctttccatagcagctacgctcacagccaaagcctggaccgactaatgaatccactcatcgaccaatacttgtactatctctctagaactattaacggttctggacagaatcaacaaacgctaaaattcagtgtggccggacccagcaacatggctgtccagggaagaaactacatacctggacccagctaccgacaacaacgtgtctcaaccactgtgactcaaaacaacaacagcgaatttgcttggcctggagcttcttcttgggctctcaatggacgtaatagcttgatgaatcctggacctgctatggccagccacaaagaaggagaggaccgtttctttcctttgtctggatctttaatttttggcaaacaaggtaccggcagagacaacgtggatgcggacaaagtcatgataaccaacgaagaagaaattaaaactactaacccggtagcaacggagtcctatggacaagtggccacaaaccaccagagtgcccaaaaagggccaggttacgaacatgctcaggcacaaaccggttgggttcaaaaccaaggaatacttccgggtatggtttggcaggacagagatgtgtacctgcaaggacccatttgggccaaaattcctcacacggacggcaactttcacccttctccgctgatgggagggtttggaatgaagcacccgcctcctcagatcctcatcaaaaacacacctgtacctgcggatcctccaacggccttcaacaaggacaagctgaactctttcatcacccagtattctactggccaagtcagcgtggagatcgagtgggagctgcagaaggaaaacagcaagcgctggaacccggagatccagtacacttccaactattacaagtctaataatgttgaatttgctgttaatactgaaggtgtatatagtgaaccccgccccattggcaccagatacctgactcgtaatctg

SEQ ID NO: 103 - DNA, 2229 bp, Adeno-Associated Virus 9
  source 1..2229: mol_type = other DNA
atggctgccgatggttatcttccagattggctcgaggacaaccttagtgaaggaattcgcgagtggtgggctttgaaacctggagcccctcaacccaaggcaaatcaacaacatcaagacaacgctcgaggtcttgtgcttccgggttacaaataccttggacccggcaacggactcgacaagggggagccggtcaacgcagcagacgcggcggccctcgagcacgacaaggcctacgaccagcagctcaaggccggagacaacccgtacctcaagtacaaccacgccgacgccgagttccaggagcggctcaaagaagatacgtcttttgggggcaacctcgggcgagcagtcttccaggccaaaaagaggcttcttgaacctcttggtctggttgaggaagcggctaagacggctcctggaaagaagaggcctgtagagcagtctcctcaggaaccggactcctccgcgggtattggcaaatcgggtgcacagcccgctaaaaagagactcaatttcggtcagactggcgacacagagtcagtcccagaccctcaaccaatcggagaacctcccgcagccccctcaggtgtgggatctcttacaatggcttcaggtggtggcgcaccagtggcagacaataacgaaggtgccgatggagtgggtagttcctcgggaaattggcattgcgattcccaatggctgggggacagagtcatcaccaccagcacccgaacctgggccctgcccacctacaacaatcacctctacaagcaaatctccaacagcacatctggaggatcttcaaatgacaacgcctacttcggctacagcaccccctgggggtattttgacttcaacagattccactgccacttctcaccacgtgactggcagcgactcatcaacaacaactggggattccggcctaagcgactcaacttcaagctcttcaacattcaggtcaaagaggttacggacaacaatggagtcaagaccatcgccaataaccttaccagcacggtccaggtcttcacggactcagactatcagctcccgtacgtgctcgggtcggctcacgagggctgcctcccgccgttcccagcggacgttttcatgattcctcagtacgggtatctgacgcttaatgatggaagccaggccgtgggtcgttcgtccttttactgcctggaatatttcccgtcgcaaatgctaagaacgggtaacaacttccagttcagctacgagtttgagaacgtacctttccatagcagctacgctcacagccaaagcctggaccgactaatgaatccactcatcgaccaatacttgtactatctctctagaactattaacggttctggacagaatcaacaaacgctaaaattcagtgtggccggacccagcaacatggctgtccagggaagaaactacatacctggacccagctaccgacaacaacgtgtctcaaccactgtgactcaaaacaacaacagcgaatttgcttggcctggagcttcttcttgggctctcaatggacgtaatagcttgatgaatcctggacctgctatggccagccacaaagaaggagaggaccgtttctttcctttgtctggatctttaatttttggcaaacaaggtaccggcagagacaacgtggatgcggacaaagtcatgataaccaacgaagaagaaattaaaactactaacccggtagcaacggagtcctatggacaagtggccacaaaccaccagagtgctcaaaaggggccaggatacgagcatgcgcaggcccaaaccggttgggttcaaaaccaaggaatacttccgggtatggtttggcaggacagagatgtgtacctgcaaggacccatttgggccaaaattcctcacacggacggcaactttcacccttctccgctgatgggagggtttggaatgaagcacccgcctcctcagatcctcatcaaaaacacacctgtacctgcggatcctccaacggccttcaacaaggacaagctgaactctttcatcacccagtattctactggccaagtcagcgtggagatcgagtgggagctgcagaaggaaaacagcaagcgctggaacccggagatccagtacacttccaactattacaagtctaataatgttgaatttgctgttaatactgaaggtgtatatagtgaaccccgccccattggcaccagatacctgactcgtaatctg

SEQ ID NO: 104 - DNA, 2229 bp, Adeno-Associated Virus 9
  source 1..2229: mol_type = other DNA
atggctgccgatggttatcttccagattggctcgaggacaaccttagtgaaggaattcgcgagtggtgggctttgaaacctggagcccctcaacccaaggcaaatcaacaacatcaagacaacgctcgaggtcttgtgcttccgggttacaaataccttggacccggcaacggactcgacaagggggagccggtcaacgcagcagacgcggcggccctcgagcacgacaaggcctacgaccagcagctcaaggccggagacaacccgtacctcaagtacaaccacgccgacgccgagttccaggagcggctcaaagaagatacgtcttttgggggcaacctcgggcgagcagtcttccaggccaaaaagaggcttcttgaacctcttggtctggttgaggaagcggctaagacggctcctggaaagaagaggcctgtagagcagtctcctcaggaaccggactcctccgcgggtattggcaaatcgggtgcacagcccgctaaaaagagactcaatttcggtcagactggcgacacagagtcagtcccagaccctcaaccaatcggagaacctcccgcagccccctcaggtgtgggatctcttacaatggcttcaggtggtggcgcaccagtggcagacaataacgaaggtgccgatggagtgggtagttcctcgggaaattggcattgcgattcccaatggctgggggacagagtcatcaccaccagcacccgaacctgggccctgcccacctacaacaatcacctctacaagcaaatctccaacagcacatctggaggatcttcaaatgacaacgcctacttcggctacagcaccccctgggggtattttgacttcaacagattccactgccacttctcaccacgtgactggcagcgactcatcaacaacaactggggattccggcctaagcgactcaacttcaagctcttcaacattcaggtcaaagaggttacggacaacaatggagtcaagaccatcgccaataaccttaccagcacggtccaggtcttcacggactcagactatcagctcccgtacgtgctcgggtcggctcacgagggctgcctcccgccgttcccagcggacgttttcatgattcctcagtacgggtatctgacgcttaatgatggaagccaggccgtgggtcgttcgtccttttactgcctggaatatttcccgtcgcaaatgctaagaacgggtaacaacttccagttcagctacgagtttgagaacgtacctttccatagcagctacgctcacagccaaagcctggaccgactaatgaatccactcatcgaccaatacttgtactatctctctagaactattaacggttctggacagaatcaacaaacgctaaaattcagtgtggccggacccagcaacatggctgtccagggaagaaactacatacctggacccagctaccgacaacaacgtgtctcaaccactgtgactcaaaacaacaacagcgaatttgcttggcctggagcttcttcttgggctctcaatggacgtaatagcttgatgaatcctggacctgctatggccagccacaaagaaggagaggaccgtttctttcctttgtctggatctttaatttttggcaaacaaggtaccggcagagacaacgtggatgcggacaaagtcatgataaccaacgaagaagaaattaaaactactaacccggtagcaacggagtcctatggacaagtggccacaaaccaccagagtgcacagaaggggcctggttatgagcatgcgcaagcccagaccggttgggttcaaaaccaaggaatacttccgggtatggtttggcaggacagagatgtgtacctgcaaggacccatttgggccaaaattcctcacacggacggcaactttcacccttctccgctgatgggagggtttggaatgaagcacccgcctcctcagatcctcatcaaaaacacacctgtacctgcggatcctccaacggccttcaacaaggacaagctgaactctttcatcacccagtattctactggccaagtcagcgtggagatcgagtgggagctgcagaaggaaaacagcaagcgctggaacccggagatccagtacacttccaactattacaagtctaataatgttgaatttgctgttaatactgaaggtgtatatagtgaaccccgccccattggcaccagatacctgactcgtaatctg

SEQ ID NO: 105 - DNA, 2229 bp, Adeno-Associated Virus 9
  source 1..2229: mol_type = other DNA
atggctgccgatggttatcttccagattggctcgaggacaaccttagtgaaggaattcgcgagtggtgggctttgaaacctggagcccctcaacccaaggcaaatcaacaacatcaagacaacgctcgaggtcttgtgcttccgggttacaaataccttggacccggcaacggactcgacaagggggagccggtcaacgcagcagacgcggcggccctcgagcacgacaaggcctacgaccagcagctcaaggccggagacaacccgtacctcaagtacaaccacgccgacgccgagttccaggagcggctcaaagaagatacgtcttttgggggcaacctcgggcgagcagtcttccaggccaaaaagaggcttcttgaacctcttggtctggttgaggaagcggctaagacggctcctggaaagaagaggcctgtagagcagtctcctcaggaaccggactcctccgcgggtattggcaaatcgggtgcacagcccgctaaaaagagactcaatttcggtcagactggcgacacagagtcagtcccagaccctcaaccaatcggagaacctcccgcagccccctcaggtgtgggatctcttacaatggcttcaggtggtggcgcaccagtggcagacaataacgaaggtgccgatggagtgggtagttcctcgggaaattggcattgcgattcccaatggctgggggacagagtcatcaccaccagcacccgaacctgggccctgcccacctacaacaatcacctctacaagcaaatctccaacagcacatctggaggatcttcaaatgacaacgcctacttcggctacagcaccccctgggggtattttgacttcaacagattccactgccacttctcaccacgtgactggcagcgactcatcaacaacaactggggattccggcctaagcgactcaacttcaagctcttcaacattcaggtcaaagaggttacggacaacaatggagtcaagaccatcgccaataaccttaccagcacggtccaggtcttcacggactcagactatcagctcccgtacgtgctcgggtcggctcacgagggctgcctcccgccgttcccagcggacgttttcatgattcctcagtacgggtatctgacgcttaatgatggaagccaggccgtgggtcgttcgtccttttactgcctggaatatttcccgtcgcaaatgctaagaacgggtaacaacttccagttcagctacgagtttgagaacgtacctttccatagcagctacgctcacagccaaagcctggaccgactaatgaatccactcatcgaccaatacttgtactatctctctagaactattaacggttctggacagaatcaacaaacgctaaaattcagtgtggccggacccagcaacatggctgtccagggaagaaactacatacctggacccagctaccgacaacaacgtgtctcaaccactgtgactcaaaacaacaacagcgaatttgcttggcctggagcttcttcttgggctctcaatggacgtaatagcttgatgaatcctggacctgctatggccagccacaaagaaggagaggaccgtttctttcctttgtctggatctttaatttttggcaaacaaggtaccggcagagacaacgtggatgcggacaaagtcatgataaccaacgaagaagaaattaaaactactaacccggtagcaacggagtcctatggacaagtggccacaaaccaccagagtgctcaaaagggacctggttatgaacacgcccaggcccagaccggttgggttcaaaaccaaggaatacttccgggtatggtttggcaggacagagatgtgtacctgcaaggacccatttgggccaaaattcctcacacggacggcaactttcacccttctccgctgatgggagggtttggaatgaagcacccgcctcctcagatcctcatcaaaaacacacctgtacctgcggatcctccaacggccttcaacaaggacaagctgaactctttcatcacccagtattctactggccaagtcagcgtggagatcgagtgggagctgcagaaggaaaacagcaagcgctggaacccggagatccagtacacttccaactattacaagtctaataatgttgaatttgctgttaatactgaaggtgtatatagtgaaccccgccccattggcaccagatacctgactcgtaatctg

SEQ ID NO: 106 - DNA, 2229 bp, Adeno-Associated Virus 9
  source 1..2229: mol_type = other DNA
atggctgccgatggttatcttccagattggctcgaggacaaccttagtgaaggaattcgcgagtggtgggctttgaaacctggagcccctcaacccaaggcaaatcaacaacatcaagacaacgctcgaggtcttgtgcttccgggttacaaataccttggacccggcaacggactcgacaagggggagccggtcaacgcagcagacgcggcggccctcgagcacgacaaggcctacgaccagcagctcaaggccggagacaacccgtacctcaagtacaaccacgccgacgccgagttccaggagcggctcaaagaagatacgtcttttgggggcaacctcgggcgagcagtcttccaggccaaaaagaggcttcttgaacctcttggtctggttgaggaagcggctaagacggctcctggaaagaagaggcctgtagagcagtctcctcaggaaccggactcctccgcgggtattggcaaatcgggtgcacagcccgctaaaaagagactcaatttcggtcagactggcgacacagagtcagtcccagaccctcaaccaatcggagaacctcccgcagccccctcaggtgtgggatctcttacaatggcttcaggtggtggcgcaccagtggcagacaataacgaaggtgccgatggagtgggtagttcctcgggaaattggcattgcgattcccaatggctgggggacagagtcatcaccaccagcacccgaacctgggccctgcccacctacaacaatcacctctacaagcaaatctccaacagcacatctggaggatcttcaaatgacaacgcctacttcggctacagcaccccctgggggtattttgacttcaacagattccactgccacttctcaccacgtgactggcagcgactcatcaacaacaactggggattccggcctaagcgactcaacttcaagctcttcaacattcaggtcaaagaggttacggacaacaatggagtcaagaccatcgccaataaccttaccagcacggtccaggtcttcacggactcagactatcagctcccgtacgtgctcgggtcggctcacgagggctgcctcccgccgttcccagcggacgttttcatgattcctcagtacgggtatctgacgcttaatgatggaagccaggccgtgggtcgttcgtccttttactgcctggaatatttcccgtcgcaaatgctaagaacgggtaacaacttccagttcagctacgagtttgagaacgtacctttccatagcagctacgctcacagccaaagcctggaccgactaatgaatccactcatcgaccaatacttgtactatctctctagaactattaacggttctggacagaatcaacaaacgctaaaattcagtgtggccggacccagcaacatggctgtccagggaagaaactacatacctggacccagctaccgacaacaacgtgtctcaaccactgtgactcaaaacaacaacagcgaatttgcttggcctggagcttcttcttgggctctcaatggacgtaatagcttgatgaatcctggacctgctatggccagccacaaagaaggagaggaccgtttctttcctttgtctggatctttaatttttggcaaacaaggtaccggcagagacaacgtggatgcggacaaagtcatgataaccaacgaagaagaaattaaaactactaacccggtagcaacggagtcctatggacaagtggccacaaaccaccagagtgcacagaaaggtccgggctatgaacacgcacaagctcagaccggttgggttcaaaaccaaggaatacttccgggtatggtttggcaggacagagatgtgtacctgcaaggacccatttgggccaaaattcctcacacggacggcaactttcacccttctccgctgatgggagggtttggaatgaagcacccgcctcctcagatcctcatcaaaaacacacctgtacctgcggatcctccaacggccttcaacaaggacaagctgaactctttcatcacccagtattctactggccaagtcagcgtggagatcgagtgggagctgcagaaggaaaacagcaagcgctggaacccggagatccagtacacttccaactattacaagtctaataatgttgaatttgctgttaatactgaaggtgtatatagtgaaccccgccccattggcaccagatacctgactcgtaatctg

SEQ ID NO: 107 - DNA, 2229 bp, Adeno-Associated Virus 9
  source 1..2229: mol_type = other DNA
atggctgccgatggttatcttccagattggctcgaggacaaccttagtgaaggaattcgcgagtggtgggctttgaaacctggagcccctcaacccaaggcaaatcaacaacatcaagacaacgctcgaggtcttgtgcttccgggttacaaataccttggacccggcaacggactcgacaagggggagccggtcaacgcagcagacgcggcggccctcgagcacgacaaggcctacgaccagcagctcaaggccggagacaacccgtacctcaagtacaaccacgccgacgccgagttccaggagcggctcaaagaagatacgtcttttgggggcaacctcgggcgagcagtcttccaggccaaaaagaggcttcttgaacctcttggtctggttgaggaagcggctaagacggctcctggaaagaagaggcctgtagagcagtctcctcaggaaccggactcctccgcgggtattggcaaatcgggtgcacagcccgctaaaaagagactcaatttcggtcagactggcgacacagagtcagtcccagaccctcaaccaatcggagaacctcccgcagccccctcaggtgtgggatctcttacaatggcttcaggtggtggcgcaccagtggcagacaataacgaaggtgccgatggagtgggtagttcctcgggaaattggcattgcgattcccaatggctgggggacagagtcatcaccaccagcacccgaacctgggccctgcccacctacaacaatcacctctacaagcaaatctccaacagcacatctggaggatcttcaaatgacaacgcctacttcggctacagcaccccctgggggtattttgacttcaacagattccactgccacttctcaccacgtgactggcagcgactcatcaacaacaactggggattccggcctaagcgactcaacttcaagctcttcaacattcaggtcaaagaggttacggacaacaatggagtcaagaccatcgccaataaccttaccagcacggtccaggtcttcacggactcagactatcagctcccgtacgtgctcgggtcggctcacgagggctgcctcccgccgttcccagcggacgttttcatgattcctcagtacgggtatctgacgcttaatgatggaagccaggccgtgggtcgttcgtccttttactgcctggaatatttcccgtcgcaaatgctaagaacgggtaacaacttccagttcagctacgagtttgagaacgtacctttccatagcagctacgctcacagccaaagcctggaccgactaatgaatccactcatcgaccaatacttgtactatctctctagaactattaacggttctggacagaatcaacaaacgctaaaattcagtgtggccggacccagcaacatggctgtccagggaagaaactacatacctggacccagctaccgacaacaacgtgtctcaaccactgtgactcaaaacaacaacagcgaatttgcttggcctggagcttcttcttgggctctcaatggacgtaatagcttgatgaatcctggacctgctatggccagccacaaagaaggagaggaccgtttctttcctttgtctggatctttaatttttggcaaacaaggtaccggcagagacaacgtggatgcggacaaagtcatgataaccaacgaagaagaaattaaaactactaacccggtagcaacggagtcctatggacaagtggccacaaaccaccagagtgctcagaagggaccggggtatgagcacgcacaagctcagaccggttgggttcaaaaccaaggaatacttccgggtatggtttggcaggacagagatgtgtacctgcaaggacccatttgggccaaaattcctcacacggacggcaactttcacccttctccgctgatgggagggtttggaatgaagcacccgcctcctcagatcctcatcaaaaacacacctgtacctgcggatcctccaacggccttcaacaaggacaagctgaactctttcatcacccagtattctactggccaagtcagcgtggagatcgagtgggagctgcagaaggaaaacagcaagcgctggaacccggagatccagtacacttccaactattacaagtctaataatgttgaatttgctgttaatactgaaggtgtatatagtgaaccccgccccattggcaccagatacctgactcgtaatctg

SEQ ID NO: 108 - DNA, 2229 bp, Adeno-Associated Virus 9
  source 1..2229: mol_type = other DNA
atggctgccgatggttatcttccagattggctcgaggacaaccttagtgaaggaattcgcgagtggtgggctttgaaacctggagcccctcaacccaaggcaaatcaacaacatcaagacaacgctcgaggtcttgtgcttccgggttacaaataccttggacccggcaacggactcgacaagggggagccggtcaacgcagcagacgcggcggccctcgagcacgacaaggcctacgaccagcagctcaaggccggagacaacccgtacctcaagtacaaccacgccgacgccgagttccaggagcggctcaaagaagatacgtcttttgggggcaacctcgggcgagcagtcttccaggccaaaaagaggcttcttgaacctcttggtctggttgaggaagcggctaagacggctcctggaaagaagaggcctgtagagcagtctcctcaggaaccggactcctccgcgggtattggcaaatcgggtgcacagcccgctaaaaagagactcaatttcggtcagactggcgacacagagtcagtcccagaccctcaaccaatcggagaacctcccgcagccccctcaggtgtgggatctcttacaatggcttcaggtggtggcgcaccagtggcagacaataacgaaggtgccgatggagtgggtagttcctcgggaaattggcattgcgattcccaatggctgggggacagagtcatcaccaccagcacccgaacctgggccctgcccacctacaacaatcacctctacaagcaaatctccaacagcacatctggaggatcttcaaatgacaacgcctacttcggctacagcaccccctgggggtattttgacttcaacagattccactgccacttctcaccacgtgactggcagcgactcatcaacaacaactggggattccggcctaagcgactcaacttcaagctcttcaacattcaggtcaaagaggttacggacaacaatggagtcaagaccatcgccaataaccttaccagcacggtccaggtcttcacggactcagactatcagctcccgtacgtgctcgggtcggctcacgagggctgcctcccgccgttcccagcggacgttttcatgattcctcagtacgggtatctgacgcttaatgatggaagccaggccgtgggtcgttcgtccttttactgcctggaatatttcccgtcgcaaatgctaagaacgggtaacaacttccagttcagctacgagtttgagaacgtacctttccatagcagctacgctcacagccaaagcctggaccgactaatgaatccactcatcgaccaatacttgtactatctctctagaactattaacggttctggacagaatcaacaaacgctaaaattcagtgtggccggacccagcaacatggctgtccagggaagaaactacatacctggacccagctaccgacaacaacgtgtctcaaccactgtgactcaaaacaacaacagcgaatttgcttggcctggagcttcttcttgggctctcaatggacgtaatagcttgatgaatcctggacctgctatggccagccacaaagaaggagaggaccgtttctttcctttgtctggatctttaatttttggcaaacaaggtaccggcagagacaacgtggatgcggacaaagtcatgataaccaacgaagaagaaattaaaactactaacccggtagcaacggagtcctatggacaagtggccacaaaccaccagagtgcccaaaaaggtccggggtacgaacacgcccaggctcagaccggttgggttcaaaaccaaggaatacttccgggtatggtttggcaggacagagatgtgtacctgcaaggacccatttgggccaaaattcctcacacggacggcaactttcacccttctccgctgatgggagggtttggaatgaagcacccgcctcctcagatcctcatcaaaaacacacctgtacctgcggatcctccaacggccttcaacaaggacaagctgaactctttcatcacccagtattctactggccaagtcagcgtggagatcgagtgggagctgcagaaggaaaacagcaagcgctggaacccggagatccagtacacttccaactattacaagtctaataatgttgaatttgctgttaatactgaaggtgtatatagtgaaccccgccccattggcaccagatacctgactcgtaatctg

SEQ ID NO: 109 - DNA, 2229 bp, Adeno-Associated Virus 9
  source 1..2229: mol_type = other DNA
atggctgccgatggttatcttccagattggctcgaggacaaccttagtgaaggaattcgcgagtggtgggctttgaaacctggagcccctcaacccaaggcaaatcaacaacatcaagacaacgctcgaggtcttgtgcttccgggttacaaataccttggacccggcaacggactcgacaagggggagccggtcaacgcagcagacgcggcggccctcgagcacgacaaggcctacgaccagcagctcaaggccggagacaacccgtacctcaagtacaaccacgccgacgccgagttccaggagcggctcaaagaagatacgtcttttgggggcaacctcgggcgagcagtcttccaggccaaaaagaggcttcttgaacctcttggtctggttgaggaagcggctaagacggctcctggaaagaagaggcctgtagagcagtctcctcaggaaccggactcctccgcgggtattggcaaatcgggtgcacagcccgctaaaaagagactcaatttcggtcagactggcgacacagagtcagtcccagaccctcaaccaatcggagaacctcccgcagccccctcaggtgtgggatctcttacaatggcttcaggtggtggcgcaccagtggcagacaataacgaaggtgccgatggagtgggtagttcctcgggaaattggcattgcgattcccaatggctgggggacagagtcatcaccaccagcacccgaacctgggccctgcccacctacaacaatcacctctacaagcaaatctccaacagcacatctggaggatcttcaaatgacaacgcctacttcggctacagcaccccctgggggtattttgacttcaacagattccactgccacttctcaccacgtgactggcagcgactcatcaacaacaactggggattccggcctaagcgactcaacttcaagctcttcaacattcaggtcaaagaggttacggacaacaatggagtcaagaccatcgccaataaccttaccagcacggtccaggtcttcacggactcagactatcagctcccgtacgtgctcgggtcggctcacgagggctgcctcccgccgttcccagcggacgttttcatgattcctcagtacgggtatctgacgcttaatgatggaagccaggccgtgggtcgttcgtccttttactgcctggaatatttcccgtcgcaaatgctaagaacgggtaacaacttccagttcagctacgagtttgagaacgtacctttccatagcagctacgctcacagccaaagcctggaccgactaatgaatccactcatcgaccaatacttgtactatctctctagaactattaacggttctggacagaatcaacaaacgctaaaattcagtgtggccggacccagcaacatggctgtccagggaagaaactacatacctggacccagctaccgacaacaacgtgtctcaaccactgtgactcaaaacaacaacagcgaatttgcttggcctggagcttcttcttgggctctcaatggacgtaatagcttgatgaatcctggacctgctatggccagccacaaagaaggagaggaccgtttctttcctttgtctggatctttaatttttggcaaacaaggtaccggcagagacaacgtggatgcggacaaagtcatgataaccaacgaagaagaaattaaaactactaacccggtagcaacggagtcctatggacaagtggccacaaaccaccagagtgcacagaaaggtccaggatacgagcatgcacaagctcaaaccggttgggttcaaaaccaaggaatacttccgggtatggtttggcaggacagagatgtgtacctgcaaggacccatttgggccaaaattcctcacacggacggcaactttcacccttctccgctgatgggagggtttggaatgaagcacccgcctcctcagatcctcatcaaaaacacacctgtacctgcggatcctccaacggccttcaacaaggacaagctgaactctttcatcacccagtattctactggccaagtcagcgtggagatcgagtgggagctgcagaaggaaaacagcaagcgctggaacccggagatccagtacacttccaactattacaagtctaataatgttgaatttgctgttaatactgaaggtgtatatagtgaaccccgccccattggcaccagatacctgactcgtaatctg

SEQ ID NO: 110 - DNA, 2229 bp, Adeno-Associated Virus 9
  source 1..2229: mol_type = other DNA
atggctgccgatggttatcttccagattggctcgaggacaaccttagtgaaggaattcgcgagtggtgggctttgaaacctggagcccctcaacccaaggcaaatcaacaacatcaagacaacgctcgaggtcttgtgcttccgggttacaaataccttggacccggcaacggactcgacaagggggagccggtcaacgcagcagacgcggcggccctcgagcacgacaaggcctacgaccagcagctcaaggccggagacaacccgtacctcaagtacaaccacgccgacgccgagttccaggagcggctcaaagaagatacgtcttttgggggcaacctcgggcgagcagtcttccaggccaaaaagaggcttcttgaacctcttggtctggttgaggaagcggctaagacggctcctggaaagaagaggcctgtagagcagtctcctcaggaaccggactcctccgcgggtattggcaaatcgggtgcacagcccgctaaaaagagactcaatttcggtcagactggcgacacagagtcagtcccagaccctcaaccaatcggagaacctcccgcagccccctcaggtgtgggatctcttacaatggcttcaggtggtggcgcaccagtggcagacaataacgaaggtgccgatggagtgggtagttcctcgggaaattggcattgcgattcccaatggctgggggacagagtcatcaccaccagcacccgaacctgggccctgcccacctacaacaatcacctctacaagcaaatctccaacagcacatctggaggatcttcaaatgacaacgcctacttcggctacagcaccccctgggggtattttgacttcaacagattccactgccacttctcaccacgtgactggcagcgactcatcaacaacaactggggattccggcctaagcgactcaacttcaagctcttcaacattcaggtcaaagaggttacggacaacaatggagtcaagaccatcgccaataaccttaccagcacggtccaggtcttcacggactcagactatcagctcccgtacgtgctcgggtcggctcacgagggctgcctcccgccgttcccagcggacgttttcatgattcctcagtacgggtatctgacgcttaatgatggaagccaggccgtgggtcgttcgtccttttactgcctggaatatttcccgtcgcaaatgctaagaacgggtaacaacttccagttcagctacgagtttgagaacgtacctttccatagcagctacgctcacagccaaagcctggaccgactaatgaatccactcatcgaccaatacttgtactatctctctagaactattaacggttctggacagaatcaacaaacgctaaaattcagtgtggccggacccagcaacatggctgtccagggaagaaactacatacctggacccagctaccgacaacaacgtgtctcaaccactgtgactcaaaacaacaacagcgaatttgcttggcctggagcttcttcttgggctctcaatggacgtaatagcttgatgaatcctggacctgctatggccagccacaaagaaggagaggaccgtttctttcctttgtctggatctttaatttttggcaaacaaggtaccggcagagacaacgtggatgcggacaaagtcatgataaccaacgaagaagaaattaaaactactaacccggtagcaacggagtcctatggacaagtggccacaaaccaccagagtgcgcagaagggcccaggttatgagcatgctcaagcgcaaaccggttgggttcaaaaccaaggaatacttccgggtatggtttggcaggacagagatgtgtacctgcaaggacccatttgggccaaaattcctcacacggacggcaactttcacccttctccgctgatgggagggtttggaatgaagcacccgcctcctcagatcctcatcaaaaacacacctgtacctgcggatcctccaacggccttcaacaaggacaagctgaactctttcatcacccagtattctactggccaagtcagcgtggagatcgagtgggagctgcagaaggaaaacagcaagcgctggaacccggagatccagtacacttccaactattacaagtctaataatgttgaatttgctgttaatactgaaggtgtatatagtgaaccccgccccattggcaccagatacctgactcgtaatctg

SEQ ID NO: 111 - DNA, 2229 bp, Adeno-Associated Virus 9
  source 1..2229: mol_type = other DNA
atggctgccgatggttatcttccagattggctcgaggacaaccttagtgaaggaattcgcgagtggtgggctttgaaacctggagcccctcaacccaaggcaaatcaacaacatcaagacaacgctcgaggtcttgtgcttccgggttacaaataccttggacccggcaacggactcgacaagggggagccggtcaacgcagcagacgcggcggccctcgagcacgacaaggcctacgaccagcagctcaaggccggagacaacccgtacctcaagtacaaccacgccgacgccgagttccaggagcggctcaaagaagatacgtcttttgggggcaacctcgggcgagcagtcttccaggccaaaaagaggcttcttgaacctcttggtctggttgaggaagcggctaagacggctcctggaaagaagaggcctgtagagcagtctcctcaggaaccggactcctccgcgggtattggcaaatcgggtgcacagcccgctaaaaagagactcaatttcggtcagactggcgacacagagtcagtcccagaccctcaaccaatcggagaacctcccgcagccccctcaggtgtgggatctcttacaatggcttcaggtggtggcgcaccagtggcagacaataacgaaggtgccgatggagtgggtagttcctcgggaaattggcattgcgattcccaatggctgggggacagagtcatcaccaccagcacccgaacctgggccctgcccacctacaacaatcacctctacaagcaaatctccaacagcacatctggaggatcttcaaatgacaacgcctacttcggctacagcaccccctgggggtattttgacttcaacagattccactgccacttctcaccacgtgactggcagcgactcatcaacaacaactggggattccggcctaagcgactcaacttcaagctcttcaacattcaggtcaaagaggttacggacaacaatggagtcaagaccatcgccaataaccttaccagcacggtccaggtcttcacggactcagactatcagctcccgtacgtgctcgggtcggctcacgagggctgcctcccgccgttcccagcggacgttttcatgattcctcagtacgggtatctgacgcttaatgatggaagccaggccgtgggtcgttcgtccttttactgcctggaatatttcccgtcgcaaatgctaagaacgggtaacaacttccagttcagctacgagtttgagaacgtacctttccatagcagctacgctcacagccaaagcctggaccgactaatgaatccactcatcgaccaatacttgtactatctctctagaactattaacggttctggacagaatcaacaaacgctaaaattcagtgtggccggacccagcaacatggctgtccagggaagaaactacatacctggacccagctaccgacaacaacgtgtctcaaccactgtgactcaaaacaacaacagcgaatttgcttggcctggagcttcttcttgggctctcaatggacgtaatagcttgatgaatcctggacctgctatggccagccacaaagaaggagaggaccgtttctttcctttgtctggatctttaatttttggcaaacaaggtaccggcagagacaacgtggatgcggacaaagtcatgataaccaacgaagaagaaattaaaactactaacccggtagcaacggagtcctatggacaagtggccacaaaccaccagagtgcacaaaagaattcaccaagtgagtttgctcaagcacagaccggttgggttcaaaaccaaggaatacttccgggtatggtttggcaggacagagatgtgtacctgcaaggacccatttgggccaaaattcctcacacggacggcaactttcacccttctccgctgatgggagggtttggaatgaagcacccgcctcctcagatcctcatcaaaaacacacctgtacctgcggatcctccaacggccttcaacaaggacaagctgaactctttcatcacccagtattctactggccaagtcagcgtggagatcgagtgggagctgcagaaggaaaacagcaagcgctggaacccggagatccagtacacttccaactattacaagtctaataatgttgaatttgctgttaatactgaaggtgtatatagtgaaccccgccccattggcaccagatacctgactcgtaatctg

SEQ ID NO: 112 - DNA, 2229 bp, Adeno-Associated Virus 9
  source 1..2229: mol_type = other DNA
atggctgccgatggttatcttccagattggctcgaggacaaccttagtgaaggaattcgcgagtggtgggctttgaaacctggagcccctcaacccaaggcaaatcaacaacatcaagacaacgctcgaggtcttgtgcttccgggttacaaataccttggacccggcaacggactcgacaagggggagccggtcaacgcagcagacgcggcggccctcgagcacgacaaggcctacgaccagcagctcaaggccggagacaacccgtacctcaagtacaaccacgccgacgccgagttccaggagcggctcaaagaagatacgtcttttgggggcaacctcgggcgagcagtcttccaggccaaaaagaggcttcttgaacctcttggtctggttgaggaagcggctaagacggctcctggaaagaagaggcctgtagagcagtctcctcaggaaccggactcctccgcgggtattggcaaatcgggtgcacagcccgctaaaaagagactcaatttcggtcagactggcgacacagagtcagtcccagaccctcaaccaatcggagaacctcccgcagccccctcaggtgtgggatctcttacaatggcttcaggtggtggcgcaccagtggcagacaataacgaaggtgccgatggagtgggtagttcctcgggaaattggcattgcgattcccaatggctgggggacagagtcatcaccaccagcacccgaacctgggccctgcccacctacaacaatcacctctacaagcaaatctccaacagcacatctggaggatcttcaaatgacaacgcctacttcggctacagcaccccctgggggtattttgacttcaacagattccactgccacttctcaccacgtgactggcagcgactcatcaacaacaactggggattccggcctaagcgactcaacttcaagctcttcaacattcaggtcaaagaggttacggacaacaatggagtcaagaccatcgccaataaccttaccagcacggtccaggtcttcacggactcagactatcagctcccgtacgtgctcgggtcggctcacgagggctgcctcccgccgttcccagcggacgttttcatgattcctcagtacgggtatctgacgcttaatgatggaagccaggccgtgggtcgttcgtccttttactgcctggaatatttcccgtcgcaaatgctaagaacgggtaacaacttccagttcagctacgagtttgagaacgtacctttccatagcagctacgctcacagccaaagcctggaccgactaatgaatccactcatcgaccaatacttgtactatctctctagaactattaacggttctggacagaatcaacaaacgctaaaattcagtgtggccggacccagcaacatggctgtccagggaagaaactacatacctggacccagctaccgacaacaacgtgtctcaaccactgtgactcaaaacaacaacagcgaatttgcttggcctggagcttcttcttgggctctcaatggacgtaatagcttgatgaatcctggacctgctatggccagccacaaagaaggagaggaccgtttctttcctttgtctggatctttaatttttggcaaacaaggtaccggcagagacaacgtggatgcggacaaagtcatgataaccaacgaagaagaaattaaaactactaacccggtagcaacggagtcctatggacaagtggccacaaaccaccagagtgcccagaaaaattcaccgtctgagttcgcccaggcacaaaccggttgggttcaaaaccaaggaatacttccgggtatggtttggcaggacagagatgtgtacctgcaaggacccatttgggccaaaattcctcacacggacggcaactttcacccttctccgctgatgggagggtttggaatgaagcacccgcctcctcagatcctcatcaaaaacacacctgtacctgcggatcctccaacggccttcaacaaggacaagctgaactctttcatcacccagtattctactggccaagtcagcgtggagatcgagtgggagctgcagaaggaaaacagcaagcgctggaacccggagatccagtacacttccaactattacaagtctaataatgttgaatttgctgttaatactgaaggtgtatatagtgaaccccgccccattggcaccagatacctgactcgtaatctg

SEQ ID NO: 113 - DNA, 2229 bp, Adeno-Associated Virus 9
  source 1..2229: mol_type = other DNA
atggctgccgatggttatcttccagattggctcgaggacaaccttagtgaaggaattcgcgagtggtgggctttgaaacctggagcccctcaacccaaggcaaatcaacaacatcaagacaacgctcgaggtcttgtgcttccgggttacaaataccttggacccggcaacggactcgacaagggggagccggtcaacgcagcagacgcggcggccctcgagcacgacaaggcctacgaccagcagctcaaggccggagacaacccgtacctcaagtacaaccacgccgacgccgagttccaggagcggctcaaagaagatacgtcttttgggggcaacctcgggcgagcagtcttccaggccaaaaagaggcttcttgaacctcttggtctggttgaggaagcggctaagacggctcctggaaagaagaggcctgtagagcagtctcctcaggaaccggactcctccgcgggtattggcaaatcgggtgcacagcccgctaaaaagagactcaatttcggtcagactggcgacacagagtcagtcccagaccctcaaccaatcggagaacctcccgcagccccctcaggtgtgggatctcttacaatggcttcaggtggtggcgcaccagtggcagacaataacgaaggtgccgatggagtgggtagttcctcgggaaattggcattgcgattcccaatggctgggggacagagtcatcaccaccagcacccgaacctgggccctgcccacctacaacaatcacctctacaagcaaatctccaacagcacatctggaggatcttcaaatgacaacgcctacttcggctacagcaccccctgggggtattttgacttcaacagattccactgccacttctcaccacgtgactggcagcgactcatcaacaacaactggggattccggcctaagcgactcaacttcaagctcttcaacattcaggtcaaagaggttacggacaacaatggagtcaagaccatcgccaataaccttaccagcacggtccaggtcttcacggactcagactatcagctcccgtacgtgctcgggtcggctcacgagggctgcctcccgccgttcccagcggacgttttcatgattcctcagtacgggtatctgacgcttaatgatggaagccaggccgtgggtcgttcgtccttttactgcctggaatatttcccgtcgcaaatgctaagaacgggtaacaacttccagttcagctacgagtttgagaacgtacctttccatagcagctacgctcacagccaaagcctggaccgactaatgaatccactcatcgaccaatacttgtactatctctctagaactattaacggttctggacagaatcaacaaacgctaaaattcagtgtggccggacccagcaacatggctgtccagggaagaaactacatacctggacccagctaccgacaacaacgtgtctcaaccactgtgactcaaaacaacaacagcgaatttgcttggcctggagcttcttcttgggctctcaatggacgtaatagcttgatgaatcctggacctgctatggccagccacaaagaaggagaggaccgtttctttcctttgtctggatctttaatttttggcaaacaaggtaccggcagagacaacgtggatgcggacaaagtcatgataaccaacgaagaagaaattaaaactactaacccggtagcaacggagtcctatggacaagtggccacaaaccaccagagtgctcaaaaaaacagtccctccgagtttgcacaggctcaaaccggttgggttcaaaaccaaggaatacttccgggtatggtttggcaggacagagatgtgtacctgcaaggacccatttgggccaaaattcctcacacggacggcaactttcacccttctccgctgatgggagggtttggaatgaagcacccgcctcctcagatcctcatcaaaaacacacctgtacctgcggatcctccaacggccttcaacaaggacaagctgaactctttcatcacccagtattctactggccaagtcagcgtggagatcgagtgggagctgcagaaggaaaacagcaagcgctggaacccggagatccagtacacttccaactattacaagtctaataatgttgaatttgctgttaatactgaaggtgtatatagtgaaccccgccccattggcaccagatacctgactcgtaatctg

SEQ ID NO: 114 - DNA, 2229 bp, Adeno-Associated Virus 9
  source 1..2229: mol_type = other DNA
atggctgccgatggttatcttccagattggctcgaggacaaccttagtgaaggaattcgcgagtggtgggctttgaaacctggagcccctcaacccaaggcaaatcaacaacatcaagacaacgctcgaggtcttgtgcttccgggttacaaataccttggacccggcaacggactcgacaagggggagccggtcaacgcagcagacgcggcggccctcgagcacgacaaggcctacgaccagcagctcaaggccggagacaacccgtacctcaagtacaaccacgccgacgccgagttccaggagcggctcaaagaagatacgtcttttgggggcaacctcgggcgagcagtcttccaggccaaaaagaggcttcttgaacctcttggtctggttgaggaagcggctaagacggctcctggaaagaagaggcctgtagagcagtctcctcaggaaccggactcctccgcgggtattggcaaatcgggtgcacagcccgctaaaaagagactcaatttcggtcagactggcgacacagagtcagtcccagaccctcaaccaatcggagaacctcccgcagccccctcaggtgtgggatctcttacaatggcttcaggtggtggcgcaccagtggcagacaataacgaaggtgccgatggagtgggtagttcctcgggaaattggcattgcgattcccaatggctgggggacagagtcatcaccaccagcacccgaacctgggccctgcccacctacaacaatcacctctacaagcaaatctccaacagcacatctggaggatcttcaaatgacaacgcctacttcggctacagcaccccctgggggtattttgacttcaacagattccactgccacttctcaccacgtgactggcagcgactcatcaacaacaactggggattccggcctaagcgactcaacttcaagctcttcaacattcaggtcaaagaggttacggacaacaatggagtcaagaccatcgccaataaccttaccagcacggtccaggtcttcacggactcagactatcagctcccgtacgtgctcgggtcggctcacgagggctgcctcccgccgttcccagcggacgttttcatgattcctcagtacgggtatctgacgcttaatgatggaagccaggccgtgggtcgttcgtccttttactgcctggaatatttcccgtcgcaaatgctaagaacgggtaacaacttccagttcagctacgagtttgagaacgtacctttccatagcagctacgctcacagccaaagcctggaccgactaatgaatccactcatcgaccaatacttgtactatctctctagaactattaacggttctggacagaatcaacaaacgctaaaattcagtgtggccggacccagcaacatggctgtccagggaagaaactacatacctggacccagctaccgacaacaacgtgtctcaaccactgtgactcaaaacaacaacagcgaatttgcttggcctggagcttcttcttgggctctcaatggacgtaatagcttgatgaatcctggacctgctatggccagccacaaagaaggagaggaccgtttctttcctttgtctggatctttaatttttggcaaacaaggtaccggcagagacaacgtggatgcggacaaagtcatgataaccaacgaagaagaaattaaaactactaacccggtagcaacggagtcctatggacaagtggccacaaaccaccagagtgcgcagaagaattcaccgtcagaattcgcccaagcccagaccggttgggttcaaaaccaaggaatacttccgggtatggtttggcaggacagagatgtgtacctgcaaggacccatttgggccaaaattcctcacacggacggcaactttcacccttctccgctgatgggagggtttggaatgaagcacccgcctcctcagatcctcatcaaaaacacacctgtacctgcggatcctccaacggccttcaacaaggacaagctgaactctttcatcacccagtattctactggccaagtcagcgtggagatcgagtgggagctgcagaaggaaaacagcaagcgctggaacccggagatccagtacacttccaactattacaagtctaataatgttgaatttgctgttaatactgaaggtgtatatagtgaaccccgccccattggcaccagatacctgactcgtaatctg

SEQ ID NO: 115 - DNA, 2229 bp, Adeno-Associated Virus 9
  source 1..2229: mol_type = other DNA
atggctgccgatggttatcttccagattggctcgaggacaaccttagtgaaggaattcgcgagtggtgggctttgaaacctggagcccctcaacccaaggcaaatcaacaacatcaagacaacgctcgaggtcttgtgcttccgggttacaaataccttggacccggcaacggactcgacaagggggagccggtcaacgcagcagacgcggcggccctcgagcacgacaaggcctacgaccagcagctcaaggccggagacaacccgtacctcaagtacaaccacgccgacgccgagttccaggagcggctcaaagaagatacgtcttttgggggcaacctcgggcgagcagtcttccaggccaaaaagaggcttcttgaacctcttggtctggttgaggaagcggctaagacggctcctggaaagaagaggcctgtagagcagtctcctcaggaaccggactcctccgcgggtattggcaaatcgggtgcacagcccgctaaaaagagactcaatttcggtcagactggcgacacagagtcagtcccagaccctcaaccaatcggagaacctcccgcagccccctcaggtgtgggatctcttacaatggcttcaggtggtggcgcaccagtggcagacaataacgaaggtgccgatggagtgggtagttcctcgggaaattggcattgcgattcccaatggctgggggacagagtcatcaccaccagcacccgaacctgggccctgcccacctacaacaatcacctctacaagcaaatctccaacagcacatctggaggatcttcaaatgacaacgcctacttcggctacagcaccccctgggggtattttgacttcaacagattccactgccacttctcaccacgtgactggcagcgactcatcaacaacaactggggattccggcctaagcgactcaacttcaagctcttcaacattcaggtcaaagaggttacggacaacaatggagtcaagaccatcgccaataaccttaccagcacggtccaggtcttcacggactcagactatcagctcccgtacgtgctcgggtcggctcacgagggctgcctcccgccgttcccagcggacgttttcatgattcctcagtacgggtatctgacgcttaatgatggaagccaggccgtgggtcgttcgtccttttactgcctggaatatttcccgtcgcaaatgctaagaacgggtaacaacttccagttcagctacgagtttgagaacgtacctttccatagcagctacgctcacagccaaagcctggaccgactaatgaatccactcatcgaccaatacttgtactatctctctagaactattaacggttctggacagaatcaacaaacgctaaaattcagtgtggccggacccagcaacatggctgtccagggaagaaactacatacctggacccagctaccgacaacaacgtgtctcaaccactgtgactcaaaacaacaacagcgaatttgcttggcctggagcttcttcttgggctctcaatggacgtaatagcttgatgaatcctggacctgctatggccagccacaaagaaggagaggaccgtttctttcctttgtctggatctttaatttttggcaaacaaggtaccggcagagacaacgtggatgcggacaaagtcatgataaccaacgaagaagaaattaaaactactaacccggtagcaacggagtcctatggacaagtggccacaaaccaccagagtgcccagaaaaacagtccgtcggaattcgcccaggcccaaaccggttgggttcaaaaccaaggaatacttccgggtatggtttggcaggacagagatgtgtacctgcaaggacccatttgggccaaaattcctcacacggacggcaactttcacccttctccgctgatgggagggtttggaatgaagcacccgcctcctcagatcctcatcaaaaacacacctgtacctgcggatcctccaacggccttcaacaaggacaagctgaactctttcatcacccagtattctactggccaagtcagcgtggagatcgagtgggagctgcagaaggaaaacagcaagcgctggaacccggagatccagtacacttccaactattacaagtctaataatgttgaatttgctgttaatactgaaggtgtatatagtgaaccccgccccattggcaccagatacctgactcgtaatctg

SEQ ID NO: 116 - DNA, 2229 bp, Adeno-Associated Virus 9
  source 1..2229: mol_type = other DNA
atggctgccgatggttatcttccagattggctcgaggacaaccttagtgaaggaattcgcgagtggtgggctttgaaacctggagcccctcaacccaaggcaaatcaacaacatcaagacaacgctcgaggtcttgtgcttccgggttacaaataccttggacccggcaacggactcgacaagggggagccggtcaacgcagcagacgcggcggccctcgagcacgacaaggcctacgaccagcagctcaaggccggagacaacccgtacctcaagtacaaccacgccgacgccgagttccaggagcggctcaaagaagatacgtcttttgggggcaacctcgggcgagcagtcttccaggccaaaaagaggcttcttgaacctcttggtctggttgaggaagcggctaagacggctcctggaaagaagaggcctgtagagcagtctcctcaggaaccggactcctccgcgggtattggcaaatcgggtgcacagcccgctaaaaagagactcaatttcggtcagactggcgacacagagtcagtcccagaccctcaaccaatcggagaacctcccgcagccccctcaggtgtgggatctcttacaatggcttcaggtggtggcgcaccagtggcagacaataacgaaggtgccgatggagtgggtagttcctcgggaaattggcattgcgattcccaatggctgggggacagagtcatcaccaccagcacccgaacctgggccctgcccacctacaacaatcacctctacaagcaaatctccaacagcacatctggaggatcttcaaatgacaacgcctacttcggctacagcaccccctgggggtattttgacttcaacagattccactgccacttctcaccacgtgactggcagcgactcatcaacaacaactggggattccggcctaagcgactcaacttcaagctcttcaacattcaggtcaaagaggttacggacaacaatggagtcaagaccatcgccaataaccttaccagcacggtccaggtcttcacggactcagactatcagctcccgtacgtgctcgggtcggctcacgagggctgcctcccgccgttcccagcggacgttttcatgattcctcagtacgggtatctgacgcttaatgatggaagccaggccgtgggtcgttcgtccttttactgcctggaatatttcccgtcgcaaatgctaagaacgggtaacaacttccagttcagctacgagtttgagaacgtacctttccatagcagctacgctcacagccaaagcctggaccgactaatgaatccactcatcgaccaatacttgtactatctctctagaactattaacggttctggacagaatcaacaaacgctaaaattcagtgtggccggacccagcaacatggctgtccagggaagaaactacatacctggacccagctaccgacaacaacgtgtctcaaccactgtgactcaaaacaacaacagcgaatttgcttggcctggagcttcttcttgggctctcaatggacgtaatagcttgatgaatcctggacctgctatggccagccacaaagaaggagaggaccgtttctttcctttgtctggatctttaatttttggcaaacaaggtaccggcagagacaacgtggatgcggacaaagtcatgataaccaacgaagaagaaattaaaactactaacccggtagcaacggagtcctatggacaagtggccacaaaccaccagagtgcgcaaaaaaactcgccatcggaatttgcccaggctcagaccggttgggttcaaaaccaaggaatacttccgggtatggtttggcaggacagagatgtgtacctgcaaggacccatttgggccaaaattcctcacacggacggcaactttcacccttctccgctgatgggagggtttggaatgaagcacccgcctcctcagatcctcatcaaaaacacacctgtacctgcggatcctccaacggccttcaacaaggacaagctgaactctttcatcacccagtattctactggccaagtcagcgtggagatcgagtgggagctgcagaaggaaaacagcaagcgctggaacccggagatccagtacacttccaactattacaagtctaataatgttgaatttgctgttaatactgaaggtgtatatagtgaaccccgccccattggcaccagatacctgactcgtaatctg

SEQ ID NO: 117 - DNA, 2229 bp, Adeno-Associated Virus 9
  source 1..2229: mol_type = other DNA
atggctgccgatggttatcttccagattggctcgaggacaaccttagtgaaggaattcgcgagtggtgggctttgaaacctggagcccctcaacccaaggcaaatcaacaacatcaagacaacgctcgaggtcttgtgcttccgggttacaaataccttggacccggcaacggactcgacaagggggagccggtcaacgcagcagacgcggcggccctcgagcacgacaaggcctacgaccagcagctcaaggccggagacaacccgtacctcaagtacaaccacgccgacgccgagttccaggagcggctcaaagaagatacgtcttttgggggcaacctcgggcgagcagtcttccaggccaaaaagaggcttcttgaacctcttggtctggttgaggaagcggctaagacggctcctggaaagaagaggcctgtagagcagtctcctcaggaaccggactcctccgcgggtattggcaaatcgggtgcacagcccgctaaaaagagactcaatttcggtcagactggcgacacagagtcagtcccagaccctcaaccaatcggagaacctcccgcagccccctcaggtgtgggatctcttacaatggcttcaggtggtggcgcaccagtggcagacaataacgaaggtgccgatggagtgggtagttcctcgggaaattggcattgcgattcccaatggctgggggacagagtcatcaccaccagcacccgaacctgggccctgcccacctacaacaatcacctctacaagcaaatctccaacagcacatctggaggatcttcaaatgacaacgcctacttcggctacagcaccccctgggggtattttgacttcaacagattccactgccacttctcaccacgtgactggcagcgactcatcaacaacaactggggattccggcctaagcgactcaacttcaagctcttcaacattcaggtcaaagaggttacggacaacaatggagtcaagaccatcgccaataaccttaccagcacggtccaggtcttcacggactcagactatcagctcccgtacgtgctcgggtcggctcacgagggctgcctcccgccgttcccagcggacgttttcatgattcctcagtacgggtatctgacgcttaatgatggaagccaggccgtgggtcgttcgtccttttactgcctggaatatttcccgtcgcaaatgctaagaacgggtaacaacttccagttcagctacgagtttgagaacgtacctttccatagcagctacgctcacagccaaagcctggaccgactaatgaatccactcatcgaccaatacttgtactatctctctagaactattaacggttctggacagaatcaacaaacgctaaaattcagtgtggccggacccagcaacatggctgtccagggaagaaactacatacctggacccagctaccgacaacaacgtgtctcaaccactgtgactcaaaacaacaacagcgaatttgcttggcctggagcttcttcttgggctctcaatggacgtaatagcttgatgaatcctggacctgctatggccagccacaaagaaggagaggaccgtttctttcctttgtctggatctttaatttttggcaaacaaggtaccggcagagacaacgtggatgcggacaaagtcatgataaccaacgaagaagaaattaaaactactaacccggtagcaacggagtcctatggacaagtggccacaaaccaccagagtgcacagaagaactccccatcagagtttgcccaagcccaaaccggttgggttcaaaaccaaggaatacttccgggtatggtttggcaggacagagatgtgtacctgcaaggacccatttgggccaaaattcctcacacggacggcaactttcacccttctccgctgatgggagggtttggaatgaagcacccgcctcctcagatcctcatcaaaaacacacctgtacctgcggatcctccaacggccttcaacaaggacaagctgaactctttcatcacccagtattctactggccaagtcagcgtggagatcgagtgggagctgcagaaggaaaacagcaagcgctggaacccggagatccagtacacttccaactattacaagtctaataatgttgaatttgctgttaatactgaaggtgtatatagtgaaccccgccccattggcaccagatacctgactcgtaatctg

SEQ ID NO: 118 - DNA, 2229 bp, Adeno-Associated Virus 9
  source 1..2229: mol_type = other DNA
atggctgccgatggttatcttccagattggctcgaggacaaccttagtgaaggaattcgcgagtggtgggctttgaaacctggagcccctcaacccaaggcaaatcaacaacatcaagacaacgctcgaggtcttgtgcttccgggttacaaataccttggacccggcaacggactcgacaagggggagccggtcaacgcagcagacgcggcggccctcgagcacgacaaggcctacgaccagcagctcaaggccggagacaacccgtacctcaagtacaaccacgccgacgccgagttccaggagcggctcaaagaagatacgtcttttgggggcaacctcgggcgagcagtcttccaggccaaaaagaggcttcttgaacctcttggtctggttgaggaagcggctaagacggctcctggaaagaagaggcctgtagagcagtctcctcaggaaccggactcctccgcgggtattggcaaatcgggtgcacagcccgctaaaaagagactcaatttcggtcagactggcgacacagagtcagtcccagaccctcaaccaatcggagaacctcccgcagccccctcaggtgtgggatctcttacaatggcttcaggtggtggcgcaccagtggcagacaataacgaaggtgccgatggagtgggtagttcctcgggaaattggcattgcgattcccaatggctgggggacagagtcatcaccaccagcacccgaacctgggccctgcccacctacaacaatcacctctacaagcaaatctccaacagcacatctggaggatcttcaaatgacaacgcctacttcggctacagcaccccctgggggtattttgacttcaacagattccactgccacttctcaccacgtgactggcagcgactcatcaacaacaactggggattccggcctaagcgactcaacttcaagctcttcaacattcaggtcaaagaggttacggacaacaatggagtcaagaccatcgccaataaccttaccagcacggtccaggtcttcacggactcagactatcagctcccgtacgtgctcgggtcggctcacgagggctgcctcccgccgttcccagcggacgttttcatgattcctcagtacgggtatctgacgcttaatgatggaagccaggccgtgggtcgttcgtccttttactgcctggaatatttcccgtcgcaaatgctaagaacgggtaacaacttccagttcagctacgagtttgagaacgtacctttccatagcagctacgctcacagccaaagcctggaccgactaatgaatccactcatcgaccaatacttgtactatctctctagaactattaacggttctggacagaatcaacaaacgctaaaattcagtgtggccggacccagcaacatggctgtccagggaagaaactacatacctggacccagctaccgacaacaacgtgtctcaaccactgtgactcaaaacaacaacagcgaatttgcttggcctggagcttcttcttgggctctcaatggacgtaatagcttgatgaatcctggacctgctatggccagccacaaagaaggagaggaccgtttctttcctttgtctggatctttaatttttggcaaacaaggtaccggcagagacaacgtggatgcggacaaagtcatgataaccaacgaagaagaaattaaaactactaacccggtagcaacggagtcctatggacaagtggccacaaaccaccagagtgcccaaaaaaatagtcccagcgaattcgcgcaggcgcagaccggttgggttcaaaaccaaggaatacttccgggtatggtttggcaggacagagatgtgtacctgcaaggacccatttgggccaaaattcctcacacggacggcaactttcacccttctccgctgatgggagggtttggaatgaagcacccgcctcctcagatcctcatcaaaaacacacctgtacctgcggatcctccaacggccttcaacaaggacaagctgaactctttcatcacccagtattctactggccaagtcagcgtggagatcgagtgggagctgcagaaggaaaacagcaagcgctggaacccggagatccagtacacttccaactattacaagtctaataatgttgaatttgctgttaatactgaaggtgtatatagtgaaccccgccccattggcaccagatacctgactcgtaatctg

SEQ ID NO: 119 - DNA, 2229 bp, Adeno-Associated Virus 9
  source 1..2229: mol_type = other DNA
atggctgccgatggttatcttccagattggctcgaggacaaccttagtgaaggaattcgcgagtggtgggctttgaaacctggagcccctcaacccaaggcaaatcaacaacatcaagacaacgctcgaggtcttgtgcttccgggttacaaataccttggacccggcaacggactcgacaagggggagccggtcaacgcagcagacgcggcggccctcgagcacgacaaggcctacgaccagcagctcaaggccggagacaacccgtacctcaagtacaaccacgccgacgccgagttccaggagcggctcaaagaagatacgtcttttgggggcaacctcgggcgagcagtcttccaggccaaaaagaggcttcttgaacctcttggtctggttgaggaagcggctaagacggctcctggaaagaagaggcctgtagagcagtctcctcaggaaccggactcctccgcgggtattggcaaatcgggtgcacagcccgctaaaaagagactcaatttcggtcagactggcgacacagagtcagtcccagaccctcaaccaatcggagaacctcccgcagccccctcaggtgtgggatctcttacaatggcttcaggtggtggcgcaccagtggcagacaataacgaaggtgccgatggagtgggtagttcctcgggaaattggcattgcgattcccaatggctgggggacagagtcatcaccaccagcacccgaacctgggccctgcccacctacaacaatcacctctacaagcaaatctccaacagcacatctggaggatcttcaaatgacaacgcctacttcggctacagcaccccctgggggtattttgacttcaacagattccactgccacttctcaccacgtgactggcagcgactcatcaacaacaactggggattccggcctaagcgactcaacttcaagctcttcaacattcaggtcaaagaggttacggacaacaatggagtcaagaccatcgccaataaccttaccagcacggtccaggtcttcacggactcagactatcagctcccgtacgtgctcgggtcggctcacgagggctgcctcccgccgttcccagcggacgttttcatgattcctcagtacgggtatctgacgcttaatgatggaagccaggccgtgggtcgttcgtccttttactgcctggaatatttcccgtcgcaaatgctaagaacgggtaacaacttccagttcagctacgagtttgagaacgtacctttccatagcagctacgctcacagccaaagcctggaccgactaatgaatccactcatcgaccaatacttgtactatctctctagaactattaacggttctggacagaatcaacaaacgctaaaattcagtgtggccggacccagcaacatggctgtccagggaagaaactacatacctggacccagctaccgacaacaacgtgtctcaaccactgtgactcaaaacaacaacagcgaatttgcttggcctggagcttcttcttgggctctcaatggacgtaatagcttgatgaatcctggacctgctatggccagccacaaagaaggagaggaccgtttctttcctttgtctggatctttaatttttggcaaacaaggtaccggcagagacaacgtggatgcggacaaagtcatgataaccaacgaagaagaaattaaaactactaacccggtagcaacggagtcctatggacaagtggccacaaaccaccagagtgcacagaagaatagccctagcgagttcgcgcaagcccaaaccggttgggttcaaaaccaaggaatacttccgggtatggtttggcaggacagagatgtgtacctgcaaggacccatttgggccaaaattcctcacacggacggcaactttcacccttctccgctgatgggagggtttggaatgaagcacccgcctcctcagatcctcatcaaaaacacacctgtacctgcggatcctccaacggccttcaacaaggacaagctgaactctttcatcacccagtattctactggccaagtcagcgtggagatcgagtgggagctgcagaaggaaaacagcaagcgctggaacccggagatccagtacacttccaactattacaagtctaataatgttgaatttgctgttaatactgaaggtgtatatagtgaaccccgccccattggcaccagatacctgactcgtaatctg

SEQ ID NO: 120 - DNA, 2229 bp, Adeno-Associated Virus 9
  source 1..2229: mol_type = other DNA
atggctgccgatggttatcttccagattggctcgaggacaaccttagtgaaggaattcgcgagtggtgggctttgaaacctggagcccctcaacccaaggcaaatcaacaacatcaagacaacgctcgaggtcttgtgcttccgggttacaaataccttggacccggcaacggactcgacaagggggagccggtcaacgcagcagacgcggcggccctcgagcacgacaaggcctacgaccagcagctcaaggccggagacaacccgtacctcaagtacaaccacgccgacgccgagttccaggagcggctcaaagaagatacgtcttttgggggcaacctcgggcgagcagtcttccaggccaaaaagaggcttcttgaacctcttggtctggttgaggaagcggctaagacggctcctggaaagaagaggcctgtagagcagtctcctcaggaaccggactcctccgcgggtattggcaaatcgggtgcacagcccgctaaaaagagactcaatttcggtcagactggcgacacagagtcagtcccagaccctcaaccaatcggagaacctcccgcagccccctcaggtgtgggatctcttacaatggcttcaggtggtggcgcaccagtggcagacaataacgaaggtgccgatggagtgggtagttcctcgggaaattggcattgcgattcccaatggctgggggacagagtcatcaccaccagcacccgaacctgggccctgcccacctacaacaatcacctctacaagcaaatctccaacagcacatctggaggatcttcaaatgacaacgcctacttcggctacagcaccccctgggggtattttgacttcaacagattccactgccacttctcaccacgtgactggcagcgactcatcaacaacaactggggattccggcctaagcgactcaacttcaagctcttcaacattcaggtcaaagaggttacggacaacaatggagtcaagaccatcgccaataaccttaccagcacggtccaggtcttcacggactcagactatcagctcccgtacgtgctcgggtcggctcacgagggctgcctcccgccgttcccagcggacgttttcatgattcctcagtacgggtatctgacgcttaatgatggaagccaggccgtgggtcgttcgtccttttactgcctggaatatttcccgtcgcaaatgctaagaacgggtaacaacttccagttcagctacgagtttgagaacgtacctttccatagcagctacgctcacagccaaagcctggaccgactaatgaatccactcatcgaccaatacttgtactatctctctagaactattaacggttctggacagaatcaacaaacgctaaaattcagtgtggccggacccagcaacatggctgtccagggaagaaactacatacctggacccagctaccgacaacaacgtgtctcaaccactgtgactcaaaacaacaacagcgaatttgcttggcctggagcttcttcttgggctctcaatggacgtaatagcttgatgaatcctggacctgctatggccagccacaaagaaggagaggaccgtttctttcctttgtctggatctttaatttttggcaaacaaggtaccggcagagacaacgtggatgcggacaaagtcatgataaccaacgaagaagaaattaaaactactaacccggtagcaacggagtcctatggacaagtggccacaaaccaccagagtgcgcaaaagaactccccatcagaatttgcgcaagcccagaccggttgggttcaaaaccaaggaatacttccgggtatggtttggcaggacagagatgtgtacctgcaaggacccatttgggccaaaattcctcacacggacggcaactttcacccttctccgctgatgggagggtttggaatgaagcacccgcctcctcagatcctcatcaaaaacacacctgtacctgcggatcctccaacggccttcaacaaggacaagctgaactctttcatcacccagtattctactggccaagtcagcgtggagatcgagtgggagctgcagaaggaaaacagcaagcgctggaacccggagatccagtacacttccaactattacaagtctaataatgttgaatttgctgttaatactgaaggtgtatatagtgaaccccgccccattggcaccagatacctgactcgtaatctg

SEQ ID NO: 121 - DNA, 2229 bp, Adeno-Associated Virus 9
  source 1..2229: mol_type = other DNA
atggctgccgatggttatcttccagattggctcgaggacaaccttagtgaaggaattcgcgagtggtgggctttgaaacctggagcccctcaacccaaggcaaatcaacaacatcaagacaacgctcgaggtcttgtgcttccgggttacaaataccttggacccggcaacggactcgacaagggggagccggtcaacgcagcagacgcggcggccctcgagcacgacaaggcctacgaccagcagctcaaggccggagacaacccgtacctcaagtacaaccacgccgacgccgagttccaggagcggctcaaagaagatacgtcttttgggggcaacctcgggcgagcagtcttccaggccaaaaagaggcttcttgaacctcttggtctggttgaggaagcggctaagacggctcctggaaagaagaggcctgtagagcagtctcctcaggaaccggactcctccgcgggtattggcaaatcgggtgcacagcccgctaaaaagagactcaatttcggtcagactggcgacacagagtcagtcccagaccctcaaccaatcggagaacctcccgcagccccctcaggtgtgggatctcttacaatggcttcaggtggtggcgcaccagtggcagacaataacgaaggtgccgatggagtgggtagttcctcgggaaattggcattgcgattcccaatggctgggggacagagtcatcaccaccagcacccgaacctgggccctgcccacctacaacaatcacctctacaagcaaatctccaacagcacatctggaggatcttcaaatgacaacgcctacttcggctacagcaccccctgggggtattttgacttcaacagattccactgccacttctcaccacgtgactggcagcgactcatcaacaacaactggggattccggcctaagcgactcaacttcaagctcttcaacattcaggtcaaagaggttacggacaacaatggagtcaagaccatcgccaataaccttaccagcacggtccaggtcttcacggactcagactatcagctcccgtacgtgctcgggtcggctcacgagggctgcctcccgccgttcccagcggacgttttcatgattcctcagtacgggtatctgacgcttaatgatggaagccaggccgtgggtcgttcgtccttttactgcctggaatatttcccgtcgcaaatgctaagaacgggtaacaacttccagttcagctacgagtttgagaacgtacctttccatagcagctacgctcacagccaaagcctggaccgactaatgaatccactcatcgaccaatacttgtactatctctctagaactattaacggttctggacagaatcaacaaacgctaaaattcagtgtggccggacccagcaacatggctgtccagggaagaaactacatacctggacccagctaccgacaacaacgtgtctcaaccactgtgactcaaaacaacaacagcgaatttgcttggcctggagcttcttcttgggctctcaatggacgtaatagcttgatgaatcctggacctgctatggccagccacaaagaaggagaggaccgtttctttcctttgtctggatctttaatttttggcaaacaaggtaccggcagagacaacgtggatgcggacaaagtcatgataaccaacgaagaagaaattaaaactactaacccggtagcaacggagtcctatggacaagtggccacaaaccaccagagtgcacagttagccttgcctcaggagttcgcccaggcacaaaccggttgggttcaaaaccaaggaatacttccgggtatggtttggcaggacagagatgtgtacctgcaaggacccatttgggccaaaattcctcacacggacggcaactttcacccttctccgctgatgggagggtttggaatgaagcacccgcctcctcagatcctcatcaaaaacacacctgtacctgcggatcctccaacggccttcaacaaggacaagctgaactctttcatcacccagtattctactggccaagtcagcgtggagatcgagtgggagctgcagaaggaaaacagcaagcgctggaacccggagatccagtacacttccaactattacaagtctaataatgttgaatttgctgttaatactgaaggtgtatatagtgaaccccgccccattggcaccagatacctgactcgtaatctg

SEQ ID NO: 122 - DNA, 2229 bp, Adeno-Associated Virus 9
  source 1..2229: mol_type = other DNA
atggctgccgatggttatcttccagattggctcgaggacaaccttagtgaaggaattcgcgagtggtgggctttgaaacctggagcccctcaacccaaggcaaatcaacaacatcaagacaacgctcgaggtcttgtgcttccgggttacaaataccttggacccggcaacggactcgacaagggggagccggtcaacgcagcagacgcggcggccctcgagcacgacaaggcctacgaccagcagctcaaggccggagacaacccgtacctcaagtacaaccacgccgacgccgagttccaggagcggctcaaagaagatacgtcttttgggggcaacctcgggcgagcagtcttccaggccaaaaagaggcttcttgaacctcttggtctggttgaggaagcggctaagacggctcctggaaagaagaggcctgtagagcagtctcctcaggaaccggactcctccgcgggtattggcaaatcgggtgcacagcccgctaaaaagagactcaatttcggtcagactggcgacacagagtcagtcccagaccctcaaccaatcggagaacctcccgcagccccctcaggtgtgggatctcttacaatggcttcaggtggtggcgcaccagtggcagacaataacgaaggtgccgatggagtgggtagttcctcgggaaattggcattgcgattcccaatggctgggggacagagtcatcaccaccagcacccgaacctgggccctgcccacctacaacaatcacctctacaagcaaatctccaacagcacatctggaggatcttcaaatgacaacgcctacttcggctacagcaccccctgggggtattttgacttcaacagattccactgccacttctcaccacgtgactggcagcgactcatcaacaacaactggggattccggcctaagcgactcaacttcaagctcttcaacattcaggtcaaagaggttacggacaacaatggagtcaagaccatcgccaataaccttaccagcacggtccaggtcttcacggactcagactatcagctcccgtacgtgctcgggtcggctcacgagggctgcctcccgccgttcccagcggacgttttcatgattcctcagtacgggtatctgacgcttaatgatggaagccaggccgtgggtcgttcgtccttttactgcctggaatatttcccgtcgcaaatgctaagaacgggtaacaacttccagttcagctacgagtttgagaacgtacctttccatagcagctacgctcacagccaaagcctggaccgactaatgaatccactcatcgaccaatacttgtactatctctctagaactattaacggttctggacagaatcaacaaacgctaaaattcagtgtggccggacccagcaacatggctgtccagggaagaaactacatacctggacccagctaccgacaacaacgtgtctcaaccactgtgactcaaaacaacaacagcgaatttgcttggcctggagcttcttcttgggctctcaatggacgtaatagcttgatgaatcctggacctgctatggccagccacaaagaaggagaggaccgtttctttcctttgtctggatctttaatttttggcaaacaaggtaccggcagagacaacgtggatgcggacaaagtcatgataaccaacgaagaagaaattaaaactactaacccggtagcaacggagtcctatggacaagtggccacaaaccaccagagtgcccaattggccttacctcaggaattcgcgcaagcgcagaccggttgggttcaaaaccaaggaatacttccgggtatggtttggcaggacagagatgtgtacctgcaaggacccatttgggccaaaattcctcacacggacggcaactttcacccttctccgctgatgggagggtttggaatgaagcacccgcctcctcagatcctcatcaaaaacacacctgtacctgcggatcctccaacggccttcaacaaggacaagctgaactctttcatcacccagtattctactggccaagtcagcgtggagatcgagtgggagctgcagaaggaaaacagcaagcgctggaacccggagatccagtacacttccaactattacaagtctaataatgttgaatttgctgttaatactgaaggtgtatatagtgaaccccgccccattggcaccagatacctgactcgtaatctg

SEQ ID NO: 123 - DNA, 2229 bp, Adeno-Associated Virus 9
  source 1..2229: mol_type = other DNA
atggctgccgatggttatcttccagattggctcgaggacaaccttagtgaaggaattcgcgagtggtgggctttgaaacctggagcccctcaacccaaggcaaatcaacaacatcaagacaacgctcgaggtcttgtgcttccgggttacaaataccttggacccggcaacggactcgacaagggggagccggtcaacgcagcagacgcggcggccctcgagcacgacaaggcctacgaccagcagctcaaggccggagacaacccgtacctcaagtacaaccacgccgacgccgagttccaggagcggctcaaagaagatacgtcttttgggggcaacctcgggcgagcagtcttccaggccaaaaagaggcttcttgaacctcttggtctggttgaggaagcggctaagacggctcctggaaagaagaggcctgtagagcagtctcctcaggaaccggactcctccgcgggtattggcaaatcgggtgcacagcccgctaaaaagagactcaatttcggtcagactggcgacacagagtcagtcccagaccctcaaccaatcggagaacctcccgcagccccctcaggtgtgggatctcttacaatggcttcaggtggtggcgcaccagtggcagacaataacgaaggtgccgatggagtgggtagttcctcgggaaattggcattgcgattcccaatggctgggggacagagtcatcaccaccagcacccgaacctgggccctgcccacctacaacaatcacctctacaagcaaatctccaacagcacatctggaggatcttcaaatgacaacgcctacttcggctacagcaccccctgggggtattttgacttcaacagattccactgccacttctcaccacgtgactggcagcgactcatcaacaacaactggggattccggcctaagcgactcaacttcaagctcttcaacattcaggtcaaagaggttacggacaacaatggagtcaagaccatcgccaataaccttaccagcacggtccaggtcttcacggactcagactatcagctcccgtacgtgctcgggtcggctcacgagggctgcctcccgccgttcccagcggacgttttcatgattcctcagtacgggtatctgacgcttaatgatggaagccaggccgtgggtcgttcgtccttttactgcctggaatatttcccgtcgcaaatgctaagaacgggtaacaacttccagttcagctacgagtttgagaacgtacctttccatagcagctacgctcacagccaaagcctggaccgactaatgaatccactcatcgaccaatacttgtactatctctctagaactattaacggttctggacagaatcaacaaacgctaaaattcagtgtggccggacccagcaacatggctgtccagggaagaaactacatacctggacccagctaccgacaacaacgtgtctcaaccactgtgactcaaaacaacaacagcgaatttgcttggcctggagcttcttcttgggctctcaatggacgtaatagcttgatgaatcctggacctgctatggccagccacaaagaaggagaggaccgtttctttcctttgtctggatctttaatttttggcaaacaaggtaccggcagagacaacgtggatgcggacaaagtcatgataaccaacgaagaagaaattaaaactactaacccggtagcaacggagtcctatggacaagtggccacaaaccaccagagtgctcaactagcgctgccacaagaatttgcacaagctcagaccggttgggttcaaaaccaaggaatacttccgggtatggtttggcaggacagagatgtgtacctgcaaggacccatttgggccaaaattcctcacacggacggcaactttcacccttctccgctgatgggagggtttggaatgaagcacccgcctcctcagatcctcatcaaaaacacacctgtacctgcggatcctccaacggccttcaacaaggacaagctgaactctttcatcacccagtattctactggccaagtcagcgtggagatcgagtgggagctgcagaaggaaaacagcaagcgctggaacccggagatccagtacacttccaactattacaagtctaataatgttgaatttgctgttaatactgaaggtgtatatagtgaaccccgccccattggcaccagatacctgactcgtaatctg

SEQ ID NO: 124 - DNA, 2229 bp, Adeno-Associated Virus 9
  source 1..2229: mol_type = other DNA
atggctgccgatggttatcttccagattggctcgaggacaaccttagtgaaggaattcgcgagtggtgggctttgaaacctggagcccctcaacccaaggcaaatcaacaacatcaagacaacgctcgaggtcttgtgcttccgggttacaaataccttggacccggcaacggactcgacaagggggagccggtcaacgcagcagacgcggcggccctcgagcacgacaaggcctacgaccagcagctcaaggccggagacaacccgtacctcaagtacaaccacgccgacgccgagttccaggagcggctcaaagaagatacgtcttttgggggcaacctcgggcgagcagtcttccaggccaaaaagaggcttcttgaacctcttggtctggttgaggaagcggctaagacggctcctggaaagaagaggcctgtagagcagtctcctcaggaaccggactcctccgcgggtattggcaaatcgggtgcacagcccgctaaaaagagactcaatttcggtcagactggcgacacagagtcagtcccagaccctcaaccaatcggagaacctcccgcagccccctcaggtgtgggatctcttacaatggcttcaggtggtggcgcaccagtggcagacaataacgaaggtgccgatggagtgggtagttcctcgggaaattggcattgcgattcccaatggctgggggacagagtcatcaccaccagcacccgaacctgggccctgcccacctacaacaatcacctctacaagcaaatctccaacagcacatctggaggatcttcaaatgacaacgcctacttcggctacagcaccccctgggggtattttgacttcaacagattccactgccacttctcaccacgtgactggcagcgactcatcaacaacaactggggattccggcctaagcgactcaacttcaagctcttcaacattcaggtcaaagaggttacggacaacaatggagtcaagaccatcgccaataaccttaccagcacggtccaggtcttcacggactcagactatcagctcccgtacgtgctcgggtcggctcacgagggctgcctcccgccgttcccagcggacgttttcatgattcctcagtacgggtatctgacgcttaatgatggaagccaggccgtgggtcgttcgtccttttactgcctggaatatttcccgtcgcaaatgctaagaacgggtaacaacttccagttcagctacgagtttgagaacgtacctttccatagcagctacgctcacagccaaagcctggaccgactaatgaatccactcatcgaccaatacttgtactatctctctagaactattaacggttctggacagaatcaacaaacgctaaaattcagtgtggccggacccagcaacatggctgtccagggaagaaactacatacctggacccagctaccgacaacaacgtgtctcaaccactgtgactcaaaacaacaacagcgaatttgcttggcctggagcttcttcttgggctctcaatggacgtaatagcttgatgaatcctggacctgctatggccagccacaaagaaggagaggaccgtttctttcctttgtctggatctttaatttttggcaaacaaggtaccggcagagacaacgtggatgcggacaaagtcatgataaccaacgaagaagaaattaaaactactaacccggtagcaacggagtcctatggacaagtggccacaaaccaccagagtgcgcagcttgccctcccgcaagagttcgcccaagcacaaaccggttgggttcaaaaccaaggaatacttccgggtatggtttggcaggacagagatgtgtacctgcaaggacccatttgggccaaaattcctcacacggacggcaactttcacccttctccgctgatgggagggtttggaatgaagcacccgcctcctcagatcctcatcaaaaacacacctgtacctgcggatcctccaacggccttcaacaaggacaagctgaactctttcatcacccagtattctactggccaagtcagcgtggagatcgagtgggagctgcagaaggaaaacagcaagcgctggaacccggagatccagtacacttccaactattacaagtctaataatgttgaatttgctgttaatactgaaggtgtatatagtgaaccccgccccattggcaccagatacctgactcgtaatctg

SEQ ID NO: 125 - DNA, 2229 bp, Adeno-Associated Virus 9
  source 1..2229: mol_type = other DNA
atggctgccgatggttatcttccagattggctcgaggacaaccttagtgaaggaattcgcgagtggtgggctttgaaacctggagcccctcaacccaaggcaaatcaacaacatcaagacaacgctcgaggtcttgtgcttccgggttacaaataccttggacccggcaacggactcgacaagggggagccggtcaacgcagcagacgcggcggccctcgagcacgacaaggcctacgaccagcagctcaaggccggagacaacccgtacctcaagtacaaccacgccgacgccgagttccaggagcggctcaaagaagatacgtcttttgggggcaacctcgggcgagcagtcttccaggccaaaaagaggcttcttgaacctcttggtctggttgaggaagcggctaagacggctcctggaaagaagaggcctgtagagcagtctcctcaggaaccggactcctccgcgggtattggcaaatcgggtgcacagcccgctaaaaagagactcaatttcggtcagactggcgacacagagtcagtcccagaccctcaaccaatcggagaacctcccgcagccccctcaggtgtgggatctcttacaatggcttcaggtggtggcgcaccagtggcagacaataacgaaggtgccgatggagtgggtagttcctcgggaaattggcattgcgattcccaatggctgggggacagagtcatcaccaccagcacccgaacctgggccctgcccacctacaacaatcacctctacaagcaaatctccaacagcacatctggaggatcttcaaatgacaacgcctacttcggctacagcaccccctgggggtattttgacttcaacagattccactgccacttctcaccacgtgactggcagcgactcatcaacaacaactggggattccggcctaagcgactcaacttcaagctcttcaacattcaggtcaaagaggttacggacaacaatggagtcaagaccatcgccaataaccttaccagcacggtccaggtcttcacggactcagactatcagctcccgtacgtgctcgggtcggctcacgagggctgcctcccgccgttcccagcggacgttttcatgattcctcagtacgggtatctgacgcttaatgatggaagccaggccgtgggtcgttcgtccttttactgcctggaatatttcccgtcgcaaatgctaagaacgggtaacaacttccagttcagctacgagtttgagaacgtacctttccatagcagctacgctcacagccaaagcctggaccgactaatgaatccactcatcgaccaatacttgtactatctctctagaactattaacggttctggacagaatcaacaaacgctaaaattcagtgtggccggacccagcaacatggctgtccagggaagaaactacatacctggacccagctaccgacaacaacgtgtctcaaccactgtgactcaaaacaacaacagcgaatttgcttggcctggagcttcttcttgggctctcaatggacgtaatagcttgatgaatcctggacctgctatggccagccacaaagaaggagaggaccgtttctttcctttgtctggatctttaatttttggcaaacaaggtaccggcagagacaacgtggatgcggacaaagtcatgataaccaacgaagaagaaattaaaactactaacccggtagcaacggagtcctatggacaagtggccacaaaccaccagagtgctcaattggcactaccgcaggagtttgcacaggcgcagaccggttgggttcaaaaccaaggaatacttccgggtatggtttggcaggacagagatgtgtacctgcaaggacccatttgggccaaaattcctcacacggacggcaactttcacccttctccgctgatgggagggtttggaatgaagcacccgcctcctcagatcctcatcaaaaacacacctgtacctgcggatcctccaacggccttcaacaaggacaagctgaactctttcatcacccagtattctactggccaagtcagcgtggagatcgagtgggagctgcagaaggaaaacagcaagcgctggaacccggagatccagtacacttccaactattacaagtctaataatgttgaatttgctgttaatactgaaggtgtatatagtgaaccccgccccattggcaccagatacctgactcgtaatctg

SEQ ID NO: 126 - DNA, 2229 bp, Adeno-Associated Virus 9
  source 1..2229: mol_type = other DNA
atggctgccgatggttatcttccagattggctcgaggacaaccttagtgaaggaattcgcgagtggtgggctttgaaacctggagcccctcaacccaaggcaaatcaacaacatcaagacaacgctcgaggtcttgtgcttccgggttacaaataccttggacccggcaacggactcgacaagggggagccggtcaacgcagcagacgcggcggccctcgagcacgacaaggcctacgaccagcagctcaaggccggagacaacccgtacctcaagtacaaccacgccgacgccgagttccaggagcggctcaaagaagatacgtcttttgggggcaacctcgggcgagcagtcttccaggccaaaaagaggcttcttgaacctcttggtctggttgaggaagcggctaagacggctcctggaaagaagaggcctgtagagcagtctcctcaggaaccggactcctccgcgggtattggcaaatcgggtgcacagcccgctaaaaagagactcaatttcggtcagactggcgacacagagtcagtcccagaccctcaaccaatcggagaacctcccgcagccccctcaggtgtgggatctcttacaatggcttcaggtggtggcgcaccagtggcagacaataacgaaggtgccgatggagtgggtagttcctcgggaaattggcattgcgattcccaatggctgggggacagagtcatcaccaccagcacccgaacctgggccctgcccacctacaacaatcacctctacaagcaaatctccaacagcacatctggaggatcttcaaatgacaacgcctacttcggctacagcaccccctgggggtattttgacttcaacagattccactgccacttctcaccacgtgactggcagcgactcatcaacaacaactggggattccggcctaagcgactcaacttcaagctcttcaacattcaggtcaaagaggttacggacaacaatggagtcaagaccatcgccaataaccttaccagcacggtccaggtcttcacggactcagactatcagctcccgtacgtgctcgggtcggctcacgagggctgcctcccgccgttcccagcggacgttttcatgattcctcagtacgggtatctgacgcttaatgatggaagccaggccgtgggtcgttcgtccttttactgcctggaatatttcccgtcgcaaatgctaagaacgggtaacaacttccagttcagctacgagtttgagaacgtacctttccatagcagctacgctcacagccaaagcctggaccgactaatgaatccactcatcgaccaatacttgtactatctctctagaactattaacggttctggacagaatcaacaaacgctaaaattcagtgtggccggacccagcaacatggctgtccagggaagaaactacatacctggacccagctaccgacaacaacgtgtctcaaccactgtgactcaaaacaacaacagcgaatttgcttggcctggagcttcttcttgggctctcaatggacgtaatagcttgatgaatcctggacctgctatggccagccacaaagaaggagaggaccgtttctttcctttgtctggatctttaatttttggcaaacaaggtaccggcagagacaacgtggatgcggacaaagtcatgataaccaacgaagaagaaattaaaactactaacccggtagcaacggagtcctatggacaagtggccacaaaccaccagagtgctcaactagctttaccacaggaatttgctcaggcgcagaccggttgggttcaaaaccaaggaatacttccgggtatggtttggcaggacagagatgtgtacctgcaaggacccatttgggccaaaattcctcacacggacggcaactttcacccttctccgctgatgggagggtttggaatgaagcacccgcctcctcagatcctcatcaaaaacacacctgtacctgcggatcctccaacggccttcaacaaggacaagctgaactctttcatcacccagtattctactggccaagtcagcgtggagatcgagtgggagctgcagaaggaaaacagcaagcgctggaacccggagatccagtacacttccaactattacaagtctaataatgttgaatttgctgttaatactgaaggtgtatatagtgaaccccgccccattggcaccagatacctgactcgtaatctg

SEQ ID NO: 127 - DNA, 2229 bp, Adeno-Associated Virus 9
  source 1..2229: mol_type = other DNA
atggctgccgatggttatcttccagattggctcgaggacaaccttagtgaaggaattcgcgagtggtgggctttgaaacctggagcccctcaacccaaggcaaatcaacaacatcaagacaacgctcgaggtcttgtgcttccgggttacaaataccttggacccggcaacggactcgacaagggggagccggtcaacgcagcagacgcggcggccctcgagcacgacaaggcctacgaccagcagctcaaggccggagacaacccgtacctcaagtacaaccacgccgacgccgagttccaggagcggctcaaagaagatacgtcttttgggggcaacctcgggcgagcagtcttccaggccaaaaagaggcttcttgaacctcttggtctggttgaggaagcggctaagacggctcctggaaagaagaggcctgtagagcagtctcctcaggaaccggactcctccgcgggtattggcaaatcgggtgcacagcccgctaaaaagagactcaatttcggtcagactggcgacacagagtcagtcccagaccctcaaccaatcggagaacctcccgcagccccctcaggtgtgggatctcttacaatggcttcaggtggtggcgcaccagtggcagacaataacgaaggtgccgatggagtgggtagttcctcgggaaattggcattgcgattcccaatggctgggggacagagtcatcaccaccagcacccgaacctgggccctgcccacctacaacaatcacctctacaagcaaatctccaacagcacatctggaggatcttcaaatgacaacgcctacttcggctacagcaccccctgggggtattttgacttcaacagattccactgccacttctcaccacgtgactggcagcgactcatcaacaacaactggggattccggcctaagcgactcaacttcaagctcttcaacattcaggtcaaagaggttacggacaacaatggagtcaagaccatcgccaataaccttaccagcacggtccaggtcttcacggactcagactatcagctcccgtacgtgctcgggtcggctcacgagggctgcctcccgccgttcccagcggacgttttcatgattcctcagtacgggtatctgacgcttaatgatggaagccaggccgtgggtcgttcgtccttttactgcctggaatatttcccgtcgcaaatgctaagaacgggtaacaacttccagttcagctacgagtttgagaacgtacctttccatagcagctacgctcacagccaaagcctggaccgactaatgaatccactcatcgaccaatacttgtactatctctctagaactattaacggttctggacagaatcaacaaacgctaaaattcagtgtggccggacccagcaacatggctgtccagggaagaaactacatacctggacccagctaccgacaacaacgtgtctcaaccactgtgactcaaaacaacaacagcgaatttgcttggcctggagcttcttcttgggctctcaatggacgtaatagcttgatgaatcctggacctgctatggccagccacaaagaaggagaggaccgtttctttcctttgtctggatctttaatttttggcaaacaaggtaccggcagagacaacgtggatgcggacaaagtcatgataaccaacgaagaagaaattaaaactactaacccggtagcaacggagtcctatggacaagtggccacaaaccaccagagtgctcagctagcgctaccccaagagtttgctcaggcccaaaccggttgggttcaaaaccaaggaatacttccgggtatggtttggcaggacagagatgtgtacctgcaaggacccatttgggccaaaattcctcacacggacggcaactttcacccttctccgctgatgggagggtttggaatgaagcacccgcctcctcagatcctcatcaaaaacacacctgtacctgcggatcctccaacggccttcaacaaggacaagctgaactctttcatcacccagtattctactggccaagtcagcgtggagatcgagtgggagctgcagaaggaaaacagcaagcgctggaacccggagatccagtacacttccaactattacaagtctaataatgttgaatttgctgttaatactgaaggtgtatatagtgaaccccgccccattggcaccagatacctgactcgtaatctg

SEQ ID NO: 128 - DNA, 2229 bp, Adeno-Associated Virus 9
  source 1..2229: mol_type = other DNA
atggctgccgatggttatcttccagattggctcgaggacaaccttagtgaaggaattcgcgagtggtgggctttgaaacctggagcccctcaacccaaggcaaatcaacaacatcaagacaacgctcgaggtcttgtgcttccgggttacaaataccttggacccggcaacggactcgacaagggggagccggtcaacgcagcagacgcggcggccctcgagcacgacaaggcctacgaccagcagctcaaggccggagacaacccgtacctcaagtacaaccacgccgacgccgagttccaggagcggctcaaagaagatacgtcttttgggggcaacctcgggcgagcagtcttccaggccaaaaagaggcttcttgaacctcttggtctggttgaggaagcggctaagacggctcctggaaagaagaggcctgtagagcagtctcctcaggaaccggactcctccgcgggtattggcaaatcgggtgcacagcccgctaaaaagagactcaatttcggtcagactggcgacacagagtcagtcccagaccctcaaccaatcggagaacctcccgcagccccctcaggtgtgggatctcttacaatggcttcaggtggtggcgcaccagtggcagacaataacgaaggtgccgatggagtgggtagttcctcgggaaattggcattgcgattcccaatggctgggggacagagtcatcaccaccagcacccgaacctgggccctgcccacctacaacaatcacctctacaagcaaatctccaacagcacatctggaggatcttcaaatgacaacgcctacttcggctacagcaccccctgggggtattttgacttcaacagattccactgccacttctcaccacgtgactggcagcgactcatcaacaacaactggggattccggcctaagcgactcaacttcaagctcttcaacattcaggtcaaagaggttacggacaacaatggagtcaagaccatcgccaataaccttaccagcacggtccaggtcttcacggactcagactatcagctcccgtacgtgctcgggtcggctcacgagggctgcctcccgccgttcccagcggacgttttcatgattcctcagtacgggtatctgacgcttaatgatggaagccaggccgtgggtcgttcgtccttttactgcctggaatatttcccgtcgcaaatgctaagaacgggtaacaacttccagttcagctacgagtttgagaacgtacctttccatagcagctacgctcacagccaaagcctggaccgactaatgaatccactcatcgaccaatacttgtactatctctctagaactattaacggttctggacagaatcaacaaacgctaaaattcagtgtggccggacccagcaacatggctgtccagggaagaaactacatacctggacccagctaccgacaacaacgtgtctcaaccactgtgactcaaaacaacaacagcgaatttgcttggcctggagcttcttcttgggctctcaatggacgtaatagcttgatgaatcctggacctgctatggccagccacaaagaaggagaggaccgtttctttcctttgtctggatctttaatttttggcaaacaaggtaccggcagagacaacgtggatgcggacaaagtcatgataaccaacgaagaagaaattaaaactactaacccggtagcaacggagtcctatggacaagtggccacaaaccaccagagtgcccaacttgctcttcctcaggagtttgctcaagcgcagaccggttgggttcaaaaccaaggaatacttccgggtatggtttggcaggacagagatgtgtacctgcaaggacccatttgggccaaaattcctcacacggacggcaactttcacccttctccgctgatgggagggtttggaatgaagcacccgcctcctcagatcctcatcaaaaacacacctgtacctgcggatcctccaacggccttcaacaaggacaagctgaactctttcatcacccagtattctactggccaagtcagcgtggagatcgagtgggagctgcagaaggaaaacagcaagcgctggaacccggagatccagtacacttccaactattacaagtctaataatgttgaatttgctgttaatactgaaggtgtatatagtgaaccccgccccattggcaccagatacctgactcgtaatctg

SEQ ID NO: 129 - DNA, 2229 bp, Adeno-Associated Virus 9
  source 1..2229: mol_type = other DNA
atggctgccgatggttatcttccagattggctcgaggacaaccttagtgaaggaattcgcgagtggtgggctttgaaacctggagcccctcaacccaaggcaaatcaacaacatcaagacaacgctcgaggtcttgtgcttccgggttacaaataccttggacccggcaacggactcgacaagggggagccggtcaacgcagcagacgcggcggccctcgagcacgacaaggcctacgaccagcagctcaaggccggagacaacccgtacctcaagtacaaccacgccgacgccgagttccaggagcggctcaaagaagatacgtcttttgggggcaacctcgggcgagcagtcttccaggccaaaaagaggcttcttgaacctcttggtctggttgaggaagcggctaagacggctcctggaaagaagaggcctgtagagcagtctcctcaggaaccggactcctccgcgggtattggcaaatcgggtgcacagcccgctaaaaagagactcaatttcggtcagactggcgacacagagtcagtcccagaccctcaaccaatcggagaacctcccgcagccccctcaggtgtgggatctcttacaatggcttcaggtggtggcgcaccagtggcagacaataacgaaggtgccgatggagtgggtagttcctcgggaaattggcattgcgattcccaatggctgggggacagagtcatcaccaccagcacccgaacctgggccctgcccacctacaacaatcacctctacaagcaaatctccaacagcacatctggaggatcttcaaatgacaacgcctacttcggctacagcaccccctgggggtattttgacttcaacagattccactgccacttctcaccacgtgactggcagcgactcatcaacaacaactggggattccggcctaagcgactcaacttcaagctcttcaacattcaggtcaaagaggttacggacaacaatggagtcaagaccatcgccaataaccttaccagcacggtccaggtcttcacggactcagactatcagctcccgtacgtgctcgggtcggctcacgagggctgcctcccgccgttcccagcggacgttttcatgattcctcagtacgggtatctgacgcttaatgatggaagccaggccgtgggtcgttcgtccttttactgcctggaatatttcccgtcgcaaatgctaagaacgggtaacaacttccagttcagctacgagtttgagaacgtacctttccatagcagctacgctcacagccaaagcctggaccgactaatgaatccactcatcgaccaatacttgtactatctctctagaactattaacggttctggacagaatcaacaaacgctaaaattcagtgtggccggacccagcaacatggctgtccagggaagaaactacatacctggacccagctaccgacaacaacgtgtctcaaccactgtgactcaaaacaacaacagcgaatttgcttggcctggagcttcttcttgggctctcaatggacgtaatagcttgatgaatcctggacctgctatggccagccacaaagaaggagaggaccgtttctttcctttgtctggatctttaatttttggcaaacaaggtaccggcagagacaacgtggatgcggacaaagtcatgataaccaacgaagaagaaattaaaactactaacccggtagcaacggagtcctatggacaagtggccacaaaccaccagagtgcgcagttggcgctaccccaagaattcgcccaggctcaaaccggttgggttcaaaaccaaggaatacttccgggtatggtttggcaggacagagatgtgtacctgcaaggacccatttgggccaaaattcctcacacggacggcaactttcacccttctccgctgatgggagggtttggaatgaagcacccgcctcctcagatcctcatcaaaaacacacctgtacctgcggatcctccaacggccttcaacaaggacaagctgaactctttcatcacccagtattctactggccaagtcagcgtggagatcgagtgggagctgcagaaggaaaacagcaagcgctggaacccggagatccagtacacttccaactattacaagtctaataatgttgaatttgctgttaatactgaaggtgtatatagtgaaccccgccccattggcaccagatacctgactcgtaatctg

SEQ ID NO: 130 - DNA, 2229 bp, Adeno-Associated Virus 9
  source 1..2229: mol_type = other DNA
atggctgccgatggttatcttccagattggctcgaggacaaccttagtgaaggaattcgcgagtggtgggctttgaaacctggagcccctcaacccaaggcaaatcaacaacatcaagacaacgctcgaggtcttgtgcttccgggttacaaataccttggacccggcaacggactcgacaagggggagccggtcaacgcagcagacgcggcggccctcgagcacgacaaggcctacgaccagcagctcaaggccggagacaacccgtacctcaagtacaaccacgccgacgccgagttccaggagcggctcaaagaagatacgtcttttgggggcaacctcgggcgagcagtcttccaggccaaaaagaggcttcttgaacctcttggtctggttgaggaagcggctaagacggctcctggaaagaagaggcctgtagagcagtctcctcaggaaccggactcctccgcgggtattggcaaatcgggtgcacagcccgctaaaaagagactcaatttcggtcagactggcgacacagagtcagtcccagaccctcaaccaatcggagaacctcccgcagccccctcaggtgtgggatctcttacaatggcttcaggtggtggcgcaccagtggcagacaataacgaaggtgccgatggagtgggtagttcctcgggaaattggcattgcgattcccaatggctgggggacagagtcatcaccaccagcacccgaacctgggccctgcccacctacaacaatcacctctacaagcaaatctccaacagcacatctggaggatcttcaaatgacaacgcctacttcggctacagcaccccctgggggtattttgacttcaacagattccactgccacttctcaccacgtgactggcagcgactcatcaacaacaactggggattccggcctaagcgactcaacttcaagctcttcaacattcaggtcaaagaggttacggacaacaatggagtcaagaccatcgccaataaccttaccagcacggtccaggtcttcacggactcagactatcagctcccgtacgtgctcgggtcggctcacgagggctgcctcccgccgttcccagcggacgttttcatgattcctcagtacgggtatctgacgcttaatgatggaagccaggccgtgggtcgttcgtccttttactgcctggaatatttcccgtcgcaaatgctaagaacgggtaacaacttccagttcagctacgagtttgagaacgtacctttccatagcagctacgctcacagccaaagcctggaccgactaatgaatccactcatcgaccaatacttgtactatctctctagaactattaacggttctggacagaatcaacaaacgctaaaattcagtgtggccggacccagcaacatggctgtccagggaagaaactacatacctggacccagctaccgacaacaacgtgtctcaaccactgtgactcaaaacaacaacagcgaatttgcttggcctggagcttcttcttgggctctcaatggacgtaatagcttgatgaatcctggacctgctatggccagccacaaagaaggagaggaccgtttctttcctttgtctggatctttaatttttggcaaacaaggtaccggcagagacaacgtggatgcggacaaagtcatgataaccaacgaagaagaaattaaaactactaacccggtagcaacggagtcctatggacaagtggccacaaaccaccagagtgcccagctcgccctcccacaagaattcgctcaagcccaaaccggttgggttcaaaaccaaggaatacttccgggtatggtttggcaggacagagatgtgtacctgcaaggacccatttgggccaaaattcctcacacggacggcaactttcacccttctccgctgatgggagggtttggaatgaagcacccgcctcctcagatcctcatcaaaaacacacctgtacctgcggatcctccaacggccttcaacaaggacaagctgaactctttcatcacccagtattctactggccaagtcagcgtggagatcgagtgggagctgcagaaggaaaacagcaagcgctggaacccggagatccagtacacttccaactattacaagtctaataatgttgaatttgctgttaatactgaaggtgtatatagtgaaccccgccccattggcaccagatacctgactcgtaatctg

SEQ ID NO: 131 - DNA, 2229 bp, Adeno-Associated Virus 9
  source 1..2229: mol_type = other DNA
atggctgccgatggttatcttccagattggctcgaggacaaccttagtgaaggaattcgcgagtggtgggctttgaaacctggagcccctcaacccaaggcaaatcaacaacatcaagacaacgctcgaggtcttgtgcttccgggttacaaataccttggacccggcaacggactcgacaagggggagccggtcaacgcagcagacgcggcggccctcgagcacgacaaggcctacgaccagcagctcaaggccggagacaacccgtacctcaagtacaaccacgccgacgccgagttccaggagcggctcaaagaagatacgtcttttgggggcaacctcgggcgagcagtcttccaggccaaaaagaggcttcttgaacctcttggtctggttgaggaagcggctaagacggctcctggaaagaagaggcctgtagagcagtctcctcaggaaccggactcctccgcgggtattggcaaatcgggtgcacagcccgctaaaaagagactcaatttcggtcagactggcgacacagagtcagtcccagaccctcaaccaatcggagaacctcccgcagccccctcaggtgtgggatctcttacaatggcttcaggtggtggcgcaccagtggcagacaataacgaaggtgccgatggagtgggtagttcctcgggaaattggcattgcgattcccaatggctgggggacagagtcatcaccaccagcacccgaacctgggccctgcccacctacaacaatcacctctacaagcaaatctccaacagcacatctggaggatcttcaaatgacaacgcctacttcggctacagcaccccctgggggtattttgacttcaacagattccactgccacttctcaccacgtgactggcagcgactcatcaacaacaactggggattccggcctaagcgactcaacttcaagctcttcaacattcaggtcaaagaggttacggacaacaatggagtcaagaccatcgccaataaccttaccagcacggtccaggtcttcacggactcagactatcagctcccgtacgtgctcgggtcggctcacgagggctgcctcccgccgttcccagcggacgttttcatgattcctcagtacgggtatctgacgcttaatgatggaagccaggccgtgggtcgttcgtccttttactgcctggaatatttcccgtcgcaaatgctaagaacgggtaacaacttccagttcagctacgagtttgagaacgtacctttccatagcagctacgctcacagccaaagcctggaccgactaatgaatccactcatcgaccaatacttgtactatctctctagaactattaacggttctggacagaatcaacaaacgctaaaattcagtgtggccggacccagcaacatggctgtccagggaagaaactacatacctggacccagctaccgacaacaacgtgtctcaaccactgtgactcaaaacaacaacagcgaatttgcttggcctggagcttcttcttgggctctcaatggacgtaatagcttgatgaatcctggacctgctatggccagccacaaagaaggagaggaccgtttctttcctttgtctggatctttaatttttggcaaacaaggtaccggcagagacaacgtggatgcggacaaagtcatgataaccaacgaagaagaaattaaaactactaacccggtagcaacggagtcctatggacaagtggccacaaaccaccagagtgctcaacagaatatcccctctgagtacgcacaagctcaaaccggttgggttcaaaaccaaggaatacttccgggtatggtttggcaggacagagatgtgtacctgcaaggacccatttgggccaaaattcctcacacggacggcaactttcacccttctccgctgatgggagggtttggaatgaagcacccgcctcctcagatcctcatcaaaaacacacctgtacctgcggatcctccaacggccttcaacaaggacaagctgaactctttcatcacccagtattctactggccaagtcagcgtggagatcgagtgggagctgcagaaggaaaacagcaagcgctggaacccggagatccagtacacttccaactattacaagtctaataatgttgaatttgctgttaatactgaaggtgtatatagtgaaccccgccccattggcaccagatacctgactcgtaatctg

SEQ ID NO: 132 - DNA, 2229 bp, Adeno-Associated Virus 9
  source 1..2229: mol_type = other DNA
atggctgccgatggttatcttccagattggctcgaggacaaccttagtgaaggaattcgcgagtggtgggctttgaaacctggagcccctcaacccaaggcaaatcaacaacatcaagacaacgctcgaggtcttgtgcttccgggttacaaataccttggacccggcaacggactcgacaagggggagccggtcaacgcagcagacgcggcggccctcgagcacgacaaggcctacgaccagcagctcaaggccggagacaacccgtacctcaagtacaaccacgccgacgccgagttccaggagcggctcaaagaagatacgtcttttgggggcaacctcgggcgagcagtcttccaggccaaaaagaggcttcttgaacctcttggtctggttgaggaagcggctaagacggctcctggaaagaagaggcctgtagagcagtctcctcaggaaccggactcctccgcgggtattggcaaatcgggtgcacagcccgctaaaaagagactcaatttcggtcagactggcgacacagagtcagtcccagaccctcaaccaatcggagaacctcccgcagccccctcaggtgtgggatctcttacaatggcttcaggtggtggcgcaccagtggcagacaataacgaaggtgccgatggagtgggtagttcctcgggaaattggcattgcgattcccaatggctgggggacagagtcatcaccaccagcacccgaacctgggccctgcccacctacaacaatcacctctacaagcaaatctccaacagcacatctggaggatcttcaaatgacaacgcctacttcggctacagcaccccctgggggtattttgacttcaacagattccactgccacttctcaccacgtgactggcagcgactcatcaacaacaactggggattccggcctaagcgactcaacttcaagctcttcaacattcaggtcaaagaggttacggacaacaatggagtcaagaccatcgccaataaccttaccagcacggtccaggtcttcacggactcagactatcagctcccgtacgtgctcgggtcggctcacgagggctgcctcccgccgttcccagcggacgttttcatgattcctcagtacgggtatctgacgcttaatgatggaagccaggccgtgggtcgttcgtccttttactgcctggaatatttcccgtcgcaaatgctaagaacgggtaacaacttccagttcagctacgagtttgagaacgtacctttccatagcagctacgctcacagccaaagcctggaccgactaatgaatccactcatcgaccaatacttgtactatctctctagaactattaacggttctggacagaatcaacaaacgctaaaattcagtgtggccggacccagcaacatggctgtccagggaagaaactacatacctggacccagctaccgacaacaacgtgtctcaaccactgtgactcaaaacaacaacagcgaatttgcttggcctggagcttcttcttgggctctcaatggacgtaatagcttgatgaatcctggacctgctatggccagccacaaagaaggagaggaccgtttctttcctttgtctggatctttaatttttggcaaacaaggtaccggcagagacaacgtggatgcggacaaagtcatgataaccaacgaagaagaaattaaaactactaacccggtagcaacggagtcctatggacaagtggccacaaaccaccagagtgcacagcaaaacattccgtcagaatatgcccaggcacagaccggttgggttcaaaaccaaggaatacttccgggtatggtttggcaggacagagatgtgtacctgcaaggacccatttgggccaaaattcctcacacggacggcaactttcacccttctccgctgatgggagggtttggaatgaagcacccgcctcctcagatcctcatcaaaaacacacctgtacctgcggatcctccaacggccttcaacaaggacaagctgaactctttcatcacccagtattctactggccaagtcagcgtggagatcgagtgggagctgcagaaggaaaacagcaagcgctggaacccggagatccagtacacttccaactattacaagtctaataatgttgaatttgctgttaatactgaaggtgtatatagtgaaccccgccccattggcaccagatacctgactcgtaatctg

SEQ ID NO: 133 - DNA, 2229 bp, Adeno-Associated Virus 9
  source 1..2229: mol_type = other DNA
atggctgccgatggttatcttccagattggctcgaggacaaccttagtgaaggaattcgcgagtggtgggctttgaaacctggagcccctcaacccaaggcaaatcaacaacatcaagacaacgctcgaggtcttgtgcttccgggttacaaataccttggacccggcaacggactcgacaagggggagccggtcaacgcagcagacgcggcggccctcgagcacgacaaggcctacgaccagcagctcaaggccggagacaacccgtacctcaagtacaaccacgccgacgccgagttccaggagcggctcaaagaagatacgtcttttgggggcaacctcgggcgagcagtcttccaggccaaaaagaggcttcttgaacctcttggtctggttgaggaagcggctaagacggctcctggaaagaagaggcctgtagagcagtctcctcaggaaccggactcctccgcgggtattggcaaatcgggtgcacagcccgctaaaaagagactcaatttcggtcagactggcgacacagagtcagtcccagaccctcaaccaatcggagaacctcccgcagccccctcaggtgtgggatctcttacaatggcttcaggtggtggcgcaccagtggcagacaataacgaaggtgccgatggagtgggtagttcctcgggaaattggcattgcgattcccaatggctgggggacagagtcatcaccaccagcacccgaacctgggccctgcccacctacaacaatcacctctacaagcaaatctccaacagcacatctggaggatcttcaaatgacaacgcctacttcggctacagcaccccctgggggtattttgacttcaacagattccactgccacttctcaccacgtgactggcagcgactcatcaacaacaactggggattccggcctaagcgactcaacttcaagctcttcaacattcaggtcaaagaggttacggacaacaatggagtcaagaccatcgccaataaccttaccagcacggtccaggtcttcacggactcagactatcagctcccgtacgtgctcgggtcggctcacgagggctgcctcccgccgttcccagcggacgttttcatgattcctcagtacgggtatctgacgcttaatgatggaagccaggccgtgggtcgttcgtccttttactgcctggaatatttcccgtcgcaaatgctaagaacgggtaacaacttccagttcagctacgagtttgagaacgtacctttccatagcagctacgctcacagccaaagcctggaccgactaatgaatccactcatcgaccaatacttgtactatctctctagaactattaacggttctggacagaatcaacaaacgctaaaattcagtgtggccggacccagcaacatggctgtccagggaagaaactacatacctggacccagctaccgacaacaacgtgtctcaaccactgtgactcaaaacaacaacagcgaatttgcttggcctggagcttcttcttgggctctcaatggacgtaatagcttgatgaatcctggacctgctatggccagccacaaagaaggagaggaccgtttctttcctttgtctggatctttaatttttggcaaacaaggtaccggcagagacaacgtggatgcggacaaagtcatgataaccaacgaagaagaaattaaaactactaacccggtagcaacggagtcctatggacaagtggccacaaaccaccagagtgcccagcaaaacataccctcagaatacgcacaggctcagaccggttgggttcaaaaccaaggaatacttccgggtatggtttggcaggacagagatgtgtacctgcaaggacccatttgggccaaaattcctcacacggacggcaactttcacccttctccgctgatgggagggtttggaatgaagcacccgcctcctcagatcctcatcaaaaacacacctgtacctgcggatcctccaacggccttcaacaaggacaagctgaactctttcatcacccagtattctactggccaagtcagcgtggagatcgagtgggagctgcagaaggaaaacagcaagcgctggaacccggagatccagtacacttccaactattacaagtctaataatgttgaatttgctgttaatactgaaggtgtatatagtgaaccccgccccattggcaccagatacctgactcgtaatctg

SEQ ID NO: 134 - DNA, 2229 bp, Adeno-Associated Virus 9
  source 1..2229: mol_type = other DNA
atggctgccgatggttatcttccagattggctcgaggacaaccttagtgaaggaattcgcgagtggtgggctttgaaacctggagcccctcaacccaaggcaaatcaacaacatcaagacaacgctcgaggtcttgtgcttccgggttacaaataccttggacccggcaacggactcgacaagggggagccggtcaacgcagcagacgcggcggccctcgagcacgacaaggcctacgaccagcagctcaaggccggagacaacccgtacctcaagtacaaccacgccgacgccgagttccaggagcggctcaaagaagatacgtcttttgggggcaacctcgggcgagcagtcttccaggccaaaaagaggcttcttgaacctcttggtctggttgaggaagcggctaagacggctcctggaaagaagaggcctgtagagcagtctcctcaggaaccggactcctccgcgggtattggcaaatcgggtgcacagcccgctaaaaagagactcaatttcggtcagactggcgacacagagtcagtcccagaccctcaaccaatcggagaacctcccgcagccccctcaggtgtgggatctcttacaatggcttcaggtggtggcgcaccagtggcagacaataacgaaggtgccgatggagtgggtagttcctcgggaaattggcattgcgattcccaatggctgggggacagagtcatcaccaccagcacccgaacctgggccctgcccacctacaacaatcacctctacaagcaaatctccaacagcacatctggaggatcttcaaatgacaacgcctacttcggctacagcaccccctgggggtattttgacttcaacagattccactgccacttctcaccacgtgactggcagcgactcatcaacaacaactggggattccggcctaagcgactcaacttcaagctcttcaacattcaggtcaaagaggttacggacaacaatggagtcaagaccatcgccaataaccttaccagcacggtccaggtcttcacggactcagactatcagctcccgtacgtgctcgggtcggctcacgagggctgcctcccgccgttcccagcggacgttttcatgattcctcagtacgggtatctgacgcttaatgatggaagccaggccgtgggtcgttcgtccttttactgcctggaatatttcccgtcgcaaatgctaagaacgggtaacaacttccagttcagctacgagtttgagaacgtacctttccatagcagctacgctcacagccaaagcctggaccgactaatgaatccactcatcgaccaatacttgtactatctctctagaactattaacggttctggacagaatcaacaaacgctaaaattcagtgtggccggacccagcaacatggctgtccagggaagaaactacatacctggacccagctaccgacaacaacgtgtctcaaccactgtgactcaaaacaacaacagcgaatttgcttggcctggagcttcttcttgggctctcaatggacgtaatagcttgatgaatcctggacctgctatggccagccacaaagaaggagaggaccgtttctttcctttgtctggatctttaatttttggcaaacaaggtaccggcagagacaacgtggatgcggacaaagtcatgataaccaacgaagaagaaattaaaactactaacccggtagcaacggagtcctatggacaagtggccacaaaccaccagagtgctcaacagaatataccgagcgagtacgcgcaagctcaaaccggttgggttcaaaaccaaggaatacttccgggtatggtttggcaggacagagatgtgtacctgcaaggacccatttgggccaaaattcctcacacggacggcaactttcacccttctccgctgatgggagggtttggaatgaagcacccgcctcctcagatcctcatcaaaaacacacctgtacctgcggatcctccaacggccttcaacaaggacaagctgaactctttcatcacccagtattctactggccaagtcagcgtggagatcgagtgggagctgcagaaggaaaacagcaagcgctggaacccggagatccagtacacttccaactattacaagtctaataatgttgaatttgctgttaatactgaaggtgtatatagtgaaccccgccccattggcaccagatacctgactcgtaatctg

SEQ ID NO: 135 - DNA, 2229 bp, Adeno-Associated Virus 9
  source 1..2229: mol_type = other DNA
atggctgccgatggttatcttccagattggctcgaggacaaccttagtgaaggaattcgcgagtggtgggctttgaaacctggagcccctcaacccaaggcaaatcaacaacatcaagacaacgctcgaggtcttgtgcttccgggttacaaataccttggacccggcaacggactcgacaagggggagccggtcaacgcagcagacgcggcggccctcgagcacgacaaggcctacgaccagcagctcaaggccggagacaacccgtacctcaagtacaaccacgccgacgccgagttccaggagcggctcaaagaagatacgtcttttgggggcaacctcgggcgagcagtcttccaggccaaaaagaggcttcttgaacctcttggtctggttgaggaagcggctaagacggctcctggaaagaagaggcctgtagagcagtctcctcaggaaccggactcctccgcgggtattggcaaatcgggtgcacagcccgctaaaaagagactcaatttcggtcagactggcgacacagagtcagtcccagaccctcaaccaatcggagaacctcccgcagccccctcaggtgtgggatctcttacaatggcttcaggtggtggcgcaccagtggcagacaataacgaaggtgccgatggagtgggtagttcctcgggaaattggcattgcgattcccaatggctgggggacagagtcatcaccaccagcacccgaacctgggccctgcccacctacaacaatcacctctacaagcaaatctccaacagcacatctggaggatcttcaaatgacaacgcctacttcggctacagcaccccctgggggtattttgacttcaacagattccactgccacttctcaccacgtgactggcagcgactcatcaacaacaactggggattccggcctaagcgactcaacttcaagctcttcaacattcaggtcaaagaggttacggacaacaatggagtcaagaccatcgccaataaccttaccagcacggtccaggtcttcacggactcagactatcagctcccgtacgtgctcgggtcggctcacgagggctgcctcccgccgttcccagcggacgttttcatgattcctcagtacgggtatctgacgcttaatgatggaagccaggccgtgggtcgttcgtccttttactgcctggaatatttcccgtcgcaaatgctaagaacgggtaacaacttccagttcagctacgagtttgagaacgtacctttccatagcagctacgctcacagccaaagcctggaccgactaatgaatccactcatcgaccaatacttgtactatctctctagaactattaacggttctggacagaatcaacaaacgctaaaattcagtgtggccggacccagcaacatggctgtccagggaagaaactacatacctggacccagctaccgacaacaacgtgtctcaaccactgtgactcaaaacaacaacagcgaatttgcttggcctggagcttcttcttgggctctcaatggacgtaatagcttgatgaatcctggacctgctatggccagccacaaagaaggagaggaccgtttctttcctttgtctggatctttaatttttggcaaacaaggtaccggcagagacaacgtggatgcggacaaagtcatgataaccaacgaagaagaaattaaaactactaacccggtagcaacggagtcctatggacaagtggccacaaaccaccagagtgcacagcaaaacatcccctcggaatatgcacaggcacagaccggttgggttcaaaaccaaggaatacttccgggtatggtttggcaggacagagatgtgtacctgcaaggacccatttgggccaaaattcctcacacggacggcaactttcacccttctccgctgatgggagggtttggaatgaagcacccgcctcctcagatcctcatcaaaaacacacctgtacctgcggatcctccaacggccttcaacaaggacaagctgaactctttcatcacccagtattctactggccaagtcagcgtggagatcgagtgggagctgcagaaggaaaacagcaagcgctggaacccggagatccagtacacttccaactattacaagtctaataatgttgaatttgctgttaatactgaaggtgtatatagtgaaccccgccccattggcaccagatacctgactcgtaatctg

SEQ ID NO: 136 - DNA, 2229 bp, Adeno-Associated Virus 9
  source 1..2229: mol_type = other DNA
atggctgccgatggttatcttccagattggctcgaggacaaccttagtgaaggaattcgcgagtggtgggctttgaaacctggagcccctcaacccaaggcaaatcaacaacatcaagacaacgctcgaggtcttgtgcttccgggttacaaataccttggacccggcaacggactcgacaagggggagccggtcaacgcagcagacgcggcggccctcgagcacgacaaggcctacgaccagcagctcaaggccggagacaacccgtacctcaagtacaaccacgccgacgccgagttccaggagcggctcaaagaagatacgtcttttgggggcaacctcgggcgagcagtcttccaggccaaaaagaggcttcttgaacctcttggtctggttgaggaagcggctaagacggctcctggaaagaagaggcctgtagagcagtctcctcaggaaccggactcctccgcgggtattggcaaatcgggtgcacagcccgctaaaaagagactcaatttcggtcagactggcgacacagagtcagtcccagaccctcaaccaatcggagaacctcccgcagccccctcaggtgtgggatctcttacaatggcttcaggtggtggcgcaccagtggcagacaataacgaaggtgccgatggagtgggtagttcctcgggaaattggcattgcgattcccaatggctgggggacagagtcatcaccaccagcacccgaacctgggccctgcccacctacaacaatcacctctacaagcaaatctccaacagcacatctggaggatcttcaaatgacaacgcctacttcggctacagcaccccctgggggtattttgacttcaacagattccactgccacttctcaccacgtgactggcagcgactcatcaacaacaactggggattccggcctaagcgactcaacttcaagctcttcaacattcaggtcaaagaggttacggacaacaatggagtcaagaccatcgccaataaccttaccagcacggtccaggtcttcacggactcagactatcagctcccgtacgtgctcgggtcggctcacgagggctgcctcccgccgttcccagcggacgttttcatgattcctcagtacgggtatctgacgcttaatgatggaagccaggccgtgggtcgttcgtccttttactgcctggaatatttcccgtcgcaaatgctaagaacgggtaacaacttccagttcagctacgagtttgagaacgtacctttccatagcagctacgctcacagccaaagcctggaccgactaatgaatccactcatcgaccaatacttgtactatctctctagaactattaacggttctggacagaatcaacaaacgctaaaattcagtgtggccggacccagcaacatggctgtccagggaagaaactacatacctggacccagctaccgacaacaacgtgtctcaaccactgtgactcaaaacaacaacagcgaatttgcttggcctggagcttcttcttgggctctcaatggacgtaatagcttgatgaatcctggacctgctatggccagccacaaagaaggagaggaccgtttctttcctttgtctggatctttaatttttggcaaacaaggtaccggcagagacaacgtggatgcggacaaagtcatgataaccaacgaagaagaaattaaaactactaacccggtagcaacggagtcctatggacaagtggccacaaaccaccagagtgcccagcaaaacattccttcagaatatgcacaggcgcagaccggttgggttcaaaaccaaggaatacttccgggtatggtttggcaggacagagatgtgtacctgcaaggacccatttgggccaaaattcctcacacggacggcaactttcacccttctccgctgatgggagggtttggaatgaagcacccgcctcctcagatcctcatcaaaaacacacctgtacctgcggatcctccaacggccttcaacaaggacaagctgaactctttcatcacccagtattctactggccaagtcagcgtggagatcgagtgggagctgcagaaggaaaacagcaagcgctggaacccggagatccagtacacttccaactattacaagtctaataatgttgaatttgctgttaatactgaaggtgtatatagtgaaccccgccccattggcaccagatacctgactcgtaatctg

SEQ ID NO: 137 - DNA, 2229 bp, Adeno-Associated Virus 9
  source 1..2229: mol_type = other DNA
atggctgccgatggttatcttccagattggctcgaggacaaccttagtgaaggaattcgcgagtggtgggctttgaaacctggagcccctcaacccaaggcaaatcaacaacatcaagacaacgctcgaggtcttgtgcttccgggttacaaataccttggacccggcaacggactcgacaagggggagccggtcaacgcagcagacgcggcggccctcgagcacgacaaggcctacgaccagcagctcaaggccggagacaacccgtacctcaagtacaaccacgccgacgccgagttccaggagcggctcaaagaagatacgtcttttgggggcaacctcgggcgagcagtcttccaggccaaaaagaggcttcttgaacctcttggtctggttgaggaagcggctaagacggctcctggaaagaagaggcctgtagagcagtctcctcaggaaccggactcctccgcgggtattggcaaatcgggtgcacagcccgctaaaaagagactcaatttcggtcagactggcgacacagagtcagtcccagaccctcaaccaatcggagaacctcccgcagccccctcaggtgtgggatctcttacaatggcttcaggtggtggcgcaccagtggcagacaataacgaaggtgccgatggagtgggtagttcctcgggaaattggcattgcgattcccaatggctgggggacagagtcatcaccaccagcacccgaacctgggccctgcccacctacaacaatcacctctacaagcaaatctccaacagcacatctggaggatcttcaaatgacaacgcctacttcggctacagcaccccctgggggtattttgacttcaacagattccactgccacttctcaccacgtgactggcagcgactcatcaacaacaactggggattccggcctaagcgactcaacttcaagctcttcaacattcaggtcaaagaggttacggacaacaatggagtcaagaccatcgccaataaccttaccagcacggtccaggtcttcacggactcagactatcagctcccgtacgtgctcgggtcggctcacgagggctgcctcccgccgttcccagcggacgttttcatgattcctcagtacgggtatctgacgcttaatgatggaagccaggccgtgggtcgttcgtccttttactgcctggaatatttcccgtcgcaaatgctaagaacgggtaacaacttccagttcagctacgagtttgagaacgtacctttccatagcagctacgctcacagccaaagcctggaccgactaatgaatccactcatcgaccaatacttgtactatctctctagaactattaacggttctggacagaatcaacaaacgctaaaattcagtgtggccggacccagcaacatggctgtccagggaagaaactacatacctggacccagctaccgacaacaacgtgtctcaaccactgtgactcaaaacaacaacagcgaatttgcttggcctggagcttcttcttgggctctcaatggacgtaatagcttgatgaatcctggacctgctatggccagccacaaagaaggagaggaccgtttctttcctttgtctggatctttaatttttggcaaacaaggtaccggcagagacaacgtggatgcggacaaagtcatgataaccaacgaagaagaaattaaaactactaacccggtagcaacggagtcctatggacaagtggccacaaaccaccagagtgctcaacagaatattccgtcggagtatgcgcaagcccaaaccggttgggttcaaaaccaaggaatacttccgggtatggtttggcaggacagagatgtgtacctgcaaggacccatttgggccaaaattcctcacacggacggcaactttcacccttctccgctgatgggagggtttggaatgaagcacccgcctcctcagatcctcatcaaaaacacacctgtacctgcggatcctccaacggccttcaacaaggacaagctgaactctttcatcacccagtattctactggccaagtcagcgtggagatcgagtgggagctgcagaaggaaaacagcaagcgctggaacccggagatccagtacacttccaactattacaagtctaataatgttgaatttgctgttaatactgaaggtgtatatagtgaaccccgccccattggcaccagatacctgactcgtaatctg

SEQ ID NO: 138 - DNA, 2229 bp, Adeno-Associated Virus 9
  source 1..2229: mol_type = other DNA
atggctgccgatggttatcttccagattggctcgaggacaaccttagtgaaggaattcgcgagtggtgggctttgaaacctggagcccctcaacccaaggcaaatcaacaacatcaagacaacgctcgaggtcttgtgcttccgggttacaaataccttggacccggcaacggactcgacaagggggagccggtcaacgcagcagacgcggcggccctcgagcacgacaaggcctacgaccagcagctcaaggccggagacaacccgtacctcaagtacaaccacgccgacgccgagttccaggagcggctcaaagaagatacgtcttttgggggcaacctcgggcgagcagtcttccaggccaaaaagaggcttcttgaacctcttggtctggttgaggaagcggctaagacggctcctggaaagaagaggcctgtagagcagtctcctcaggaaccggactcctccgcgggtattggcaaatcgggtgcacagcccgctaaaaagagactcaatttcggtcagactggcgacacagagtcagtcccagaccctcaaccaatcggagaacctcccgcagccccctcaggtgtgggatctcttacaatggcttcaggtggtggcgcaccagtggcagacaataacgaaggtgccgatggagtgggtagttcctcgggaaattggcattgcgattcccaatggctgggggacagagtcatcaccaccagcacccgaacctgggccctgcccacctacaacaatcacctctacaagcaaatctccaacagcacatctggaggatcttcaaatgacaacgcctacttcggctacagcaccccctgggggtattttgacttcaacagattccactgccacttctcaccacgtgactggcagcgactcatcaacaacaactggggattccggcctaagcgactcaacttcaagctcttcaacattcaggtcaaagaggttacggacaacaatggagtcaagaccatcgccaataaccttaccagcacggtccaggtcttcacggactcagactatcagctcccgtacgtgctcgggtcggctcacgagggctgcctcccgccgttcccagcggacgttttcatgattcctcagtacgggtatctgacgcttaatgatggaagccaggccgtgggtcgttcgtccttttactgcctggaatatttcccgtcgcaaatgctaagaacgggtaacaacttccagttcagctacgagtttgagaacgtacctttccatagcagctacgctcacagccaaagcctggaccgactaatgaatccactcatcgaccaatacttgtactatctctctagaactattaacggttctggacagaatcaacaaacgctaaaattcagtgtggccggacccagcaacatggctgtccagggaagaaactacatacctggacccagctaccgacaacaacgtgtctcaaccactgtgactcaaaacaacaacagcgaatttgcttggcctggagcttcttcttgggctctcaatggacgtaatagcttgatgaatcctggacctgctatggccagccacaaagaaggagaggaccgtttctttcctttgtctggatctttaatttttggcaaacaaggtaccggcagagacaacgtggatgcggacaaagtcatgataaccaacgaagaagaaattaaaactactaacccggtagcaacggagtcctatggacaagtggccacaaaccaccagagtgcccagcaaaatattcctagtgaatatgcacaagcacagaccggttgggttcaaaaccaaggaatacttccgggtatggtttggcaggacagagatgtgtacctgcaaggacccatttgggccaaaattcctcacacggacggcaactttcacccttctccgctgatgggagggtttggaatgaagcacccgcctcctcagatcctcatcaaaaacacacctgtacctgcggatcctccaacggccttcaacaaggacaagctgaactctttcatcacccagtattctactggccaagtcagcgtggagatcgagtgggagctgcagaaggaaaacagcaagcgctggaacccggagatccagtacacttccaactattacaagtctaataatgttgaatttgctgttaatactgaaggtgtatatagtgaaccccgccccattggcaccagatacctgactcgtaatctg

SEQ ID NO: 139 - DNA, 2229 bp, Adeno-Associated Virus 9
  source 1..2229: mol_type = other DNA
atggctgccgatggttatcttccagattggctcgaggacaaccttagtgaaggaattcgcgagtggtgggctttgaaacctggagcccctcaacccaaggcaaatcaacaacatcaagacaacgctcgaggtcttgtgcttccgggttacaaataccttggacccggcaacggactcgacaagggggagccggtcaacgcagcagacgcggcggccctcgagcacgacaaggcctacgaccagcagctcaaggccggagacaacccgtacctcaagtacaaccacgccgacgccgagttccaggagcggctcaaagaagatacgtcttttgggggcaacctcgggcgagcagtcttccaggccaaaaagaggcttcttgaacctcttggtctggttgaggaagcggctaagacggctcctggaaagaagaggcctgtagagcagtctcctcaggaaccggactcctccgcgggtattggcaaatcgggtgcacagcccgctaaaaagagactcaatttcggtcagactggcgacacagagtcagtcccagaccctcaaccaatcggagaacctcccgcagccccctcaggtgtgggatctcttacaatggcttcaggtggtggcgcaccagtggcagacaataacgaaggtgccgatggagtgggtagttcctcgggaaattggcattgcgattcccaatggctgggggacagagtcatcaccaccagcacccgaacctgggccctgcccacctacaacaatcacctctacaagcaaatctccaacagcacatctggaggatcttcaaatgacaacgcctacttcggctacagcaccccctgggggtattttgacttcaacagattccactgccacttctcaccacgtgactggcagcgactcatcaacaacaactggggattccggcctaagcgactcaacttcaagctcttcaacattcaggtcaaagaggttacggacaacaatggagtcaagaccatcgccaataaccttaccagcacggtccaggtcttcacggactcagactatcagctcccgtacgtgctcgggtcggctcacgagggctgcctcccgccgttcccagcggacgttttcatgattcctcagtacgggtatctgacgcttaatgatggaagccaggccgtgggtcgttcgtccttttactgcctggaatatttcccgtcgcaaatgctaagaacgggtaacaacttccagttcagctacgagtttgagaacgtacctttccatagcagctacgctcacagccaaagcctggaccgactaatgaatccactcatcgaccaatacttgtactatctctctagaactattaacggttctggacagaatcaacaaacgctaaaattcagtgtggccggacccagcaacatggctgtccagggaagaaactacatacctggacccagctaccgacaacaacgtgtctcaaccactgtgactcaaaacaacaacagcgaatttgcttggcctggagcttcttcttgggctctcaatggacgtaatagcttgatgaatcctggacctgctatggccagccacaaagaaggagaggaccgtttctttcctttgtctggatctttaatttttggcaaacaaggtaccggcagagacaacgtggatgcggacaaagtcatgataaccaacgaagaagaaattaaaactactaacccggtagcaacggagtcctatggacaagtggccacaaaccaccagagtgctcaacagaacataccgagcgagtacgcccaggctcaaaccggttgggttcaaaaccaaggaatacttccgggtatggtttggcaggacagagatgtgtacctgcaaggacccatttgggccaaaattcctcacacggacggcaactttcacccttctccgctgatgggagggtttggaatgaagcacccgcctcctcagatcctcatcaaaaacacacctgtacctgcggatcctccaacggccttcaacaaggacaagctgaactctttcatcacccagtattctactggccaagtcagcgtggagatcgagtgggagctgcagaaggaaaacagcaagcgctggaacccggagatccagtacacttccaactattacaagtctaataatgttgaatttgctgttaatactgaaggtgtatatagtgaaccccgccccattggcaccagatacctgactcgtaatctg

SEQ ID NO: 140 - DNA, 2229 bp, Adeno-Associated Virus 9
  source 1..2229: mol_type = other DNA
atggctgccgatggttatcttccagattggctcgaggacaaccttagtgaaggaattcgcgagtggtgggctttgaaacctggagcccctcaacccaaggcaaatcaacaacatcaagacaacgctcgaggtcttgtgcttccgggttacaaataccttggacccggcaacggactcgacaagggggagccggtcaacgcagcagacgcggcggccctcgagcacgacaaggcctacgaccagcagctcaaggccggagacaacccgtacctcaagtacaaccacgccgacgccgagttccaggagcggctcaaagaagatacgtcttttgggggcaacctcgggcgagcagtcttccaggccaaaaagaggcttcttgaacctcttggtctggttgaggaagcggctaagacggctcctggaaagaagaggcctgtagagcagtctcctcaggaaccggactcctccgcgggtattggcaaatcgggtgcacagcccgctaaaaagagactcaatttcggtcagactggcgacacagagtcagtcccagaccctcaaccaatcggagaacctcccgcagccccctcaggtgtgggatctcttacaatggcttcaggtggtggcgcaccagtggcagacaataacgaaggtgccgatggagtgggtagttcctcgggaaattggcattgcgattcccaatggctgggggacagagtcatcaccaccagcacccgaacctgggccctgcccacctacaacaatcacctctacaagcaaatctccaacagcacatctggaggatcttcaaatgacaacgcctacttcggctacagcaccccctgggggtattttgacttcaacagattccactgccacttctcaccacgtgactggcagcgactcatcaacaacaactggggattccggcctaagcgactcaacttcaagctcttcaacattcaggtcaaagaggttacggacaacaatggagtcaagaccatcgccaataaccttaccagcacggtccaggtcttcacggactcagactatcagctcccgtacgtgctcgggtcggctcacgagggctgcctcccgccgttcccagcggacgttttcatgattcctcagtacgggtatctgacgcttaatgatggaagccaggccgtgggtcgttcgtccttttactgcctggaatatttcccgtcgcaaatgctaagaacgggtaacaacttccagttcagctacgagtttgagaacgtacctttccatagcagctacgctcacagccaaagcctggaccgactaatgaatccactcatcgaccaatacttgtactatctctctagaactattaacggttctggacagaatcaacaaacgctaaaattcagtgtggccggacccagcaacatggctgtccagggaagaaactacatacctggacccagctaccgacaacaacgtgtctcaaccactgtgactcaaaacaacaacagcgaatttgcttggcctggagcttcttcttgggctctcaatggacgtaatagcttgatgaatcctggacctgctatggccagccacaaagaaggagaggaccgtttctttcctttgtctggatctttaatttttggcaaacaaggtaccggcagagacaacgtggatgcggacaaagtcatgataaccaacgaagaagaaattaaaactactaacccggtagcaacggagtcctatggacaagtggccacaaaccaccagagtgcccaacagaatatacctagcgagtacgctcaagctcaaaccggttgggttcaaaaccaaggaatacttccgggtatggtttggcaggacagagatgtgtacctgcaaggacccatttgggccaaaattcctcacacggacggcaactttcacccttctccgctgatgggagggtttggaatgaagcacccgcctcctcagatcctcatcaaaaacacacctgtacctgcggatcctccaacggccttcaacaaggacaagctgaactctttcatcacccagtattctactggccaagtcagcgtggagatcgagtgggagctgcagaaggaaaacagcaagcgctggaacccggagatccagtacacttccaactattacaagtctaataatgttgaatttgctgttaatactgaaggtgtatatagtgaaccccgccccattggcaccagatacctgactcgtaatctg

SEQ ID NO: 141 - DNA, 2229 bp, Adeno-Associated Virus 9
  source 1..2229: mol_type = other DNA
atggctgccgatggttatcttccagattggctcgaggacaaccttagtgaaggaattcgcgagtggtgggctttgaaacctggagcccctcaacccaaggcaaatcaacaacatcaagacaacgctcgaggtcttgtgcttccgggttacaaataccttggacccggcaacggactcgacaagggggagccggtcaacgcagcagacgcggcggccctcgagcacgacaaggcctacgaccagcagctcaaggccggagacaacccgtacctcaagtacaaccacgccgacgccgagttccaggagcggctcaaagaagatacgtcttttgggggcaacctcgggcgagcagtcttccaggccaaaaagaggcttcttgaacctcttggtctggttgaggaagcggctaagacggctcctggaaagaagaggcctgtagagcagtctcctcaggaaccggactcctccgcgggtattggcaaatcgggtgcacagcccgctaaaaagagactcaatttcggtcagactggcgacacagagtcagtcccagaccctcaaccaatcggagaacctcccgcagccccctcaggtgtgggatctcttacaatggcttcaggtggtggcgcaccagtggcagacaataacgaaggtgccgatggagtgggtagttcctcgggaaattggcattgcgattcccaatggctgggggacagagtcatcaccaccagcacccgaacctgggccctgcccacctacaacaatcacctctacaagcaaatctccaacagcacatctggaggatcttcaaatgacaacgcctacttcggctacagcaccccctgggggtattttgacttcaacagattccactgccacttctcaccacgtgactggcagcgactcatcaacaacaactggggattccggcctaagcgactcaacttcaagctcttcaacattcaggtcaaagaggttacggacaacaatggagtcaagaccatcgccaataaccttaccagcacggtccaggtcttcacggactcagactatcagctcccgtacgtgctcgggtcggctcacgagggctgcctcccgccgttcccagcggacgttttcatgattcctcagtacgggtatctgacgcttaatgatggaagccaggccgtgggtcgttcgtccttttactgcctggaatatttcccgtcgcaaatgctaagaacgggtaacaacttccagttcagctacgagtttgagaacgtacctttccatagcagctacgctcacagccaaagcctggaccgactaatgaatccactcatcgaccaatacttgtactatctctctagaactattaacggttctggacagaatcaacaaacgctaaaattcagtgtggccggacccagcaacatggctgtccagggaagaaactacatacctggacccagctaccgacaacaacgtgtctcaaccactgtgactcaaaacaacaacagcgaatttgcttggcctggagcttcttcttgggctctcaatggacgtaatagcttgatgaatcctggacctgctatggccagccacaaagaaggagaggaccgtttctttcctttgtctggatctttaatttttggcaaacaaggtaccggcagagacaacgtggatgcggacaaagtcatgataaccaacgaagaagaaattaaaactactaacccggtagcaacggagtcctatggacaagtggccacaaaccaccagagtgctcaacaacgtatacctcaagagtatgctcaagcgcaaaccggttgggttcaaaaccaaggaatacttccgggtatggtttggcaggacagagatgtgtacctgcaaggacccatttgggccaaaattcctcacacggacggcaactttcacccttctccgctgatgggagggtttggaatgaagcacccgcctcctcagatcctcatcaaaaacacacctgtacctgcggatcctccaacggccttcaacaaggacaagctgaactctttcatcacccagtattctactggccaagtcagcgtggagatcgagtgggagctgcagaaggaaaacagcaagcgctggaacccggagatccagtacacttccaactattacaagtctaataatgttgaatttgctgttaatactgaaggtgtatatagtgaaccccgccccattggcaccagatacctgactcgtaatctg

SEQ ID NO: 142 - DNA, 2229 bp, Adeno-Associated Virus 9
  source 1..2229: mol_type = other DNA
atggctgccgatggttatcttccagattggctcgaggacaaccttagtgaaggaattcgcgagtggtgggctttgaaacctggagcccctcaacccaaggcaaatcaacaacatcaagacaacgctcgaggtcttgtgcttccgggttacaaataccttggacccggcaacggactcgacaagggggagccggtcaacgcagcagacgcggcggccctcgagcacgacaaggcctacgaccagcagctcaaggccggagacaacccgtacctcaagtacaaccacgccgacgccgagttccaggagcggctcaaagaagatacgtcttttgggggcaacctcgggcgagcagtcttccaggccaaaaagaggcttcttgaacctcttggtctggttgaggaagcggctaagacggctcctggaaagaagaggcctgtagagcagtctcctcaggaaccggactcctccgcgggtattggcaaatcgggtgcacagcccgctaaaaagagactcaatttcggtcagactggcgacacagagtcagtcccagaccctcaaccaatcggagaacctcccgcagccccctcaggtgtgggatctcttacaatggcttcaggtggtggcgcaccagtggcagacaataacgaaggtgccgatggagtgggtagttcctcgggaaattggcattgcgattcccaatggctgggggacagagtcatcaccaccagcacccgaacctgggccctgcccacctacaacaatcacctctacaagcaaatctccaacagcacatctggaggatcttcaaatgacaacgcctacttcggctacagcaccccctgggggtattttgacttcaacagattccactgccacttctcaccacgtgactggcagcgactcatcaacaacaactggggattccggcctaagcgactcaacttcaagctcttcaacattcaggtcaaagaggttacggacaacaatggagtcaagaccatcgccaataaccttaccagcacggtccaggtcttcacggactcagactatcagctcccgtacgtgctcgggtcggctcacgagggctgcctcccgccgttcccagcggacgttttcatgattcctcagtacgggtatctgacgcttaatgatggaagccaggccgtgggtcgttcgtccttttactgcctggaatatttcccgtcgcaaatgctaagaacgggtaacaacttccagttcagctacgagtttgagaacgtacctttccatagcagctacgctcacagccaaagcctggaccgactaatgaatccactcatcgaccaatacttgtactatctctctagaactattaacggttctggacagaatcaacaaacgctaaaattcagtgtggccggacccagcaacatggctgtccagggaagaaactacatacctggacccagctaccgacaacaacgtgtctcaaccactgtgactcaaaacaacaacagcgaatttgcttggcctggagcttcttcttgggctctcaatggacgtaatagcttgatgaatcctggacctgctatggccagccacaaagaaggagaggaccgtttctttcctttgtctggatctttaatttttggcaaacaaggtaccggcagagacaacgtggatgcggacaaagtcatgataaccaacgaagaagaaattaaaactactaacccggtagcaacggagtcctatggacaagtggccacaaaccaccagagtgcacagcagcgaattcctcaggaatacgcccaggcacagaccggttgggttcaaaaccaaggaatacttccgggtatggtttggcaggacagagatgtgtacctgcaaggacccatttgggccaaaattcctcacacggacggcaactttcacccttctccgctgatgggagggtttggaatgaagcacccgcctcctcagatcctcatcaaaaacacacctgtacctgcggatcctccaacggccttcaacaaggacaagctgaactctttcatcacccagtattctactggccaagtcagcgtggagatcgagtgggagctgcagaaggaaaacagcaagcgctggaacccggagatccagtacacttccaactattacaagtctaataatgttgaatttgctgttaatactgaaggtgtatatagtgaaccccgccccattggcaccagatacctgactcgtaatctg

SEQ ID NO: 143 - DNA, 2229 bp, Adeno-Associated Virus 9
  source 1..2229: mol_type = other DNA
atggctgccgatggttatcttccagattggctcgaggacaaccttagtgaaggaattcgcgagtggtgggctttgaaacctggagcccctcaacccaaggcaaatcaacaacatcaagacaacgctcgaggtcttgtgcttccgggttacaaataccttggacccggcaacggactcgacaagggggagccggtcaacgcagcagacgcggcggccctcgagcacgacaaggcctacgaccagcagctcaaggccggagacaacccgtacctcaagtacaaccacgccgacgccgagttccaggagcggctcaaagaagatacgtcttttgggggcaacctcgggcgagcagtcttccaggccaaaaagaggcttcttgaacctcttggtctggttgaggaagcggctaagacggctcctggaaagaagaggcctgtagagcagtctcctcaggaaccggactcctccgcgggtattggcaaatcgggtgcacagcccgctaaaaagagactcaatttcggtcagactggcgacacagagtcagtcccagaccctcaaccaatcggagaacctcccgcagccccctcaggtgtgggatctcttacaatggcttcaggtggtggcgcaccagtggcagacaataacgaaggtgccgatggagtgggtagttcctcgggaaattggcattgcgattcccaatggctgggggacagagtcatcaccaccagcacccgaacctgggccctgcccacctacaacaatcacctctacaagcaaatctccaacagcacatctggaggatcttcaaatgacaacgcctacttcggctacagcaccccctgggggtattttgacttcaacagattccactgccacttctcaccacgtgactggcagcgactcatcaacaacaactggggattccggcctaagcgactcaacttcaagctcttcaacattcaggtcaaagaggttacggacaacaatggagtcaagaccatcgccaataaccttaccagcacggtccaggtcttcacggactcagactatcagctcccgtacgtgctcgggtcggctcacgagggctgcctcccgccgttcccagcggacgttttcatgattcctcagtacgggtatctgacgcttaatgatggaagccaggccgtgggtcgttcgtccttttactgcctggaatatttcccgtcgcaaatgctaagaacgggtaacaacttccagttcagctacgagtttgagaacgtacctttccatagcagctacgctcacagccaaagcctggaccgactaatgaatccactcatcgaccaatacttgtactatctctctagaactattaacggttctggacagaatcaacaaacgctaaaattcagtgtggccggacccagcaacatggctgtccagggaagaaactacatacctggacccagctaccgacaacaacgtgtctcaaccactgtgactcaaaacaacaacagcgaatttgcttggcctggagcttcttcttgggctctcaatggacgtaatagcttgatgaatcctggacctgctatggccagccacaaagaaggagaggaccgtttctttcctttgtctggatctttaatttttggcaaacaaggtaccggcagagacaacgtggatgcggacaaagtcatgataaccaacgaagaagaaattaaaactactaacccggtagcaacggagtcctatggacaagtggccacaaaccaccagagtgcgcaacagcggataccacaggagtacgctcaggcacagaccggttgggttcaaaaccaaggaatacttccgggtatggtttggcaggacagagatgtgtacctgcaaggacccatttgggccaaaattcctcacacggacggcaactttcacccttctccgctgatgggagggtttggaatgaagcacccgcctcctcagatcctcatcaaaaacacacctgtacctgcggatcctccaacggccttcaacaaggacaagctgaactctttcatcacccagtattctactggccaagtcagcgtggagatcgagtgggagctgcagaaggaaaacagcaagcgctggaacccggagatccagtacacttccaactattacaagtctaataatgttgaatttgctgttaatactgaaggtgtatatagtgaaccccgccccattggcaccagatacctgactcgtaatctg

SEQ ID NO: 144 - DNA, 2229 bp, Adeno-Associated Virus 9
  source 1..2229: mol_type = other DNA
atggctgccgatggttatcttccagattggctcgaggacaaccttagtgaaggaattcgcgagtggtgggctttgaaacctggagcccctcaacccaaggcaaatcaacaacatcaagacaacgctcgaggtcttgtgcttccgggttacaaataccttggacccggcaacggactcgacaagggggagccggtcaacgcagcagacgcggcggccctcgagcacgacaaggcctacgaccagcagctcaaggccggagacaacccgtacctcaagtacaaccacgccgacgccgagttccaggagcggctcaaagaagatacgtcttttgggggcaacctcgggcgagcagtcttccaggccaaaaagaggcttcttgaacctcttggtctggttgaggaagcggctaagacggctcctggaaagaagaggcctgtagagcagtctcctcaggaaccggactcctccgcgggtattggcaaatcgggtgcacagcccgctaaaaagagactcaatttcggtcagactggcgacacagagtcagtcccagaccctcaaccaatcggagaacctcccgcagccccctcaggtgtgggatctcttacaatggcttcaggtggtggcgcaccagtggcagacaataacgaaggtgccgatggagtgggtagttcctcgggaaattggcattgcgattcccaatggctgggggacagagtcatcaccaccagcacccgaacctgggccctgcccacctacaacaatcacctctacaagcaaatctccaacagcacatctggaggatcttcaaatgacaacgcctacttcggctacagcaccccctgggggtattttgacttcaacagattccactgccacttctcaccacgtgactggcagcgactcatcaacaacaactggggattccggcctaagcgactcaacttcaagctcttcaacattcaggtcaaagaggttacggacaacaatggagtcaagaccatcgccaataaccttaccagcacggtccaggtcttcacggactcagactatcagctcccgtacgtgctcgggtcggctcacgagggctgcctcccgccgttcccagcggacgttttcatgattcctcagtacgggtatctgacgcttaatgatggaagccaggccgtgggtcgttcgtccttttactgcctggaatatttcccgtcgcaaatgctaagaacgggtaacaacttccagttcagctacgagtttgagaacgtacctttccatagcagctacgctcacagccaaagcctggaccgactaatgaatccactcatcgaccaatacttgtactatctctctagaactattaacggttctggacagaatcaacaaacgctaaaattcagtgtggccggacccagcaacatggctgtccagggaagaaactacatacctggacccagctaccgacaacaacgtgtctcaaccactgtgactcaaaacaacaacagcgaatttgcttggcctggagcttcttcttgggctctcaatggacgtaatagcttgatgaatcctggacctgctatggccagccacaaagaaggagaggaccgtttctttcctttgtctggatctttaatttttggcaaacaaggtaccggcagagacaacgtggatgcggacaaagtcatgataaccaacgaagaagaaattaaaactactaacccggtagcaacggagtcctatggacaagtggccacaaaccaccagagtgcccaacaaagaatcccccaagagtatgctcaagcccaaaccggttgggttcaaaaccaaggaatacttccgggtatggtttggcaggacagagatgtgtacctgcaaggacccatttgggccaaaattcctcacacggacggcaactttcacccttctccgctgatgggagggtttggaatgaagcacccgcctcctcagatcctcatcaaaaacacacctgtacctgcggatcctccaacggccttcaacaaggacaagctgaactctttcatcacccagtattctactggccaagtcagcgtggagatcgagtgggagctgcagaaggaaaacagcaagcgctggaacccggagatccagtacacttccaactattacaagtctaataatgttgaatttgctgttaatactgaaggtgtatatagtgaaccccgccccattggcaccagatacctgactcgtaatctg

SEQ ID NO: 145 - DNA, 2229 bp, Adeno-Associated Virus 9
  source 1..2229: mol_type = other DNA
atggctgccgatggttatcttccagattggctcgaggacaaccttagtgaaggaattcgcgagtggtgggctttgaaacctggagcccctcaacccaaggcaaatcaacaacatcaagacaacgctcgaggtcttgtgcttccgggttacaaataccttggacccggcaacggactcgacaagggggagccggtcaacgcagcagacgcggcggccctcgagcacgacaaggcctacgaccagcagctcaaggccggagacaacccgtacctcaagtacaaccacgccgacgccgagttccaggagcggctcaaagaagatacgtcttttgggggcaacctcgggcgagcagtcttccaggccaaaaagaggcttcttgaacctcttggtctggttgaggaagcggctaagacggctcctggaaagaagaggcctgtagagcagtctcctcaggaaccggactcctccgcgggtattggcaaatcgggtgcacagcccgctaaaaagagactcaatttcggtcagactggcgacacagagtcagtcccagaccctcaaccaatcggagaacctcccgcagccccctcaggtgtgggatctcttacaatggcttcaggtggtggcgcaccagtggcagacaataacgaaggtgccgatggagtgggtagttcctcgggaaattggcattgcgattcccaatggctgggggacagagtcatcaccaccagcacccgaacctgggccctgcccacctacaacaatcacctctacaagcaaatctccaacagcacatctggaggatcttcaaatgacaacgcctacttcggctacagcaccccctgggggtattttgacttcaacagattccactgccacttctcaccacgtgactggcagcgactcatcaacaacaactggggattccggcctaagcgactcaacttcaagctcttcaacattcaggtcaaagaggttacggacaacaatggagtcaagaccatcgccaataaccttaccagcacggtccaggtcttcacggactcagactatcagctcccgtacgtgctcgggtcggctcacgagggctgcctcccgccgttcccagcggacgttttcatgattcctcagtacgggtatctgacgcttaatgatggaagccaggccgtgggtcgttcgtccttttactgcctggaatatttcccgtcgcaaatgctaagaacgggtaacaacttccagttcagctacgagtttgagaacgtacctttccatagcagctacgctcacagccaaagcctggaccgactaatgaatccactcatcgaccaatacttgtactatctctctagaactattaacggttctggacagaatcaacaaacgctaaaattcagtgtggccggacccagcaacatggctgtccagggaagaaactacatacctggacccagctaccgacaacaacgtgtctcaaccactgtgactcaaaacaacaacagcgaatttgcttggcctggagcttcttcttgggctctcaatggacgtaatagcttgatgaatcctggacctgctatggccagccacaaagaaggagaggaccgtttctttcctttgtctggatctttaatttttggcaaacaaggtaccggcagagacaacgtggatgcggacaaagtcatgataaccaacgaagaagaaattaaaactactaacccggtagcaacggagtcctatggacaagtggccacaaaccaccagagtgcccagcagcgtattccgcaagagtatgcacaggcccaaaccggttgggttcaaaaccaaggaatacttccgggtatggtttggcaggacagagatgtgtacctgcaaggacccatttgggccaaaattcctcacacggacggcaactttcacccttctccgctgatgggagggtttggaatgaagcacccgcctcctcagatcctcatcaaaaacacacctgtacctgcggatcctccaacggccttcaacaaggacaagctgaactctttcatcacccagtattctactggccaagtcagcgtggagatcgagtgggagctgcagaaggaaaacagcaagcgctggaacccggagatccagtacacttccaactattacaagtctaataatgttgaatttgctgttaatactgaaggtgtatatagtgaaccccgccccattggcaccagatacctgactcgtaatctg

SEQ ID NO: 146 - DNA, 2229 bp, Adeno-Associated Virus 9
  source 1..2229: mol_type = other DNA
atggctgccgatggttatcttccagattggctcgaggacaaccttagtgaaggaattcgcgagtggtgggctttgaaacctggagcccctcaacccaaggcaaatcaacaacatcaagacaacgctcgaggtcttgtgcttccgggttacaaataccttggacccggcaacggactcgacaagggggagccggtcaacgcagcagacgcggcggccctcgagcacgacaaggcctacgaccagcagctcaaggccggagacaacccgtacctcaagtacaaccacgccgacgccgagttccaggagcggctcaaagaagatacgtcttttgggggcaacctcgggcgagcagtcttccaggccaaaaagaggcttcttgaacctcttggtctggttgaggaagcggctaagacggctcctggaaagaagaggcctgtagagcagtctcctcaggaaccggactcctccgcgggtattggcaaatcgggtgcacagcccgctaaaaagagactcaatttcggtcagactggcgacacagagtcagtcccagaccctcaaccaatcggagaacctcccgcagccccctcaggtgtgggatctcttacaatggcttcaggtggtggcgcaccagtggcagacaataacgaaggtgccgatggagtgggtagttcctcgggaaattggcattgcgattcccaatggctgggggacagagtcatcaccaccagcacccgaacctgggccctgcccacctacaacaatcacctctacaagcaaatctccaacagcacatctggaggatcttcaaatgacaacgcctacttcggctacagcaccccctgggggtattttgacttcaacagattccactgccacttctcaccacgtgactggcagcgactcatcaacaacaactggggattccggcctaagcgactcaacttcaagctcttcaacattcaggtcaaagaggttacggacaacaatggagtcaagaccatcgccaataaccttaccagcacggtccaggtcttcacggactcagactatcagctcccgtacgtgctcgggtcggctcacgagggctgcctcccgccgttcccagcggacgttttcatgattcctcagtacgggtatctgacgcttaatgatggaagccaggccgtgggtcgttcgtccttttactgcctggaatatttcccgtcgcaaatgctaagaacgggtaacaacttccagttcagctacgagtttgagaacgtacctttccatagcagctacgctcacagccaaagcctggaccgactaatgaatccactcatcgaccaatacttgtactatctctctagaactattaacggttctggacagaatcaacaaacgctaaaattcagtgtggccggacccagcaacatggctgtccagggaagaaactacatacctggacccagctaccgacaacaacgtgtctcaaccactgtgactcaaaacaacaacagcgaatttgcttggcctggagcttcttcttgggctctcaatggacgtaatagcttgatgaatcctggacctgctatggccagccacaaagaaggagaggaccgtttctttcctttgtctggatctttaatttttggcaaacaaggtaccggcagagacaacgtggatgcggacaaagtcatgataaccaacgaagaagaaattaaaactactaacccggtagcaacggagtcctatggacaagtggccacaaaccaccagagtgcacagcagaggattccccaggaatacgcccaggcacagaccggttgggttcaaaaccaaggaatacttccgggtatggtttggcaggacagagatgtgtacctgcaaggacccatttgggccaaaattcctcacacggacggcaactttcacccttctccgctgatgggagggtttggaatgaagcacccgcctcctcagatcctcatcaaaaacacacctgtacctgcggatcctccaacggccttcaacaaggacaagctgaactctttcatcacccagtattctactggccaagtcagcgtggagatcgagtgggagctgcagaaggaaaacagcaagcgctggaacccggagatccagtacacttccaactattacaagtctaataatgttgaatttgctgttaatactgaaggtgtatatagtgaaccccgccccattggcaccagatacctgactcgtaatctg

SEQ ID NO: 147 - DNA, 2229 bp, Adeno-Associated Virus 9
  source 1..2229: mol_type = other DNA
atggctgccgatggttatcttccagattggctcgaggacaaccttagtgaaggaattcgcgagtggtgggctttgaaacctggagcccctcaacccaaggcaaatcaacaacatcaagacaacgctcgaggtcttgtgcttccgggttacaaataccttggacccggcaacggactcgacaagggggagccggtcaacgcagcagacgcggcggccctcgagcacgacaaggcctacgaccagcagctcaaggccggagacaacccgtacctcaagtacaaccacgccgacgccgagttccaggagcggctcaaagaagatacgtcttttgggggcaacctcgggcgagcagtcttccaggccaaaaagaggcttcttgaacctcttggtctggttgaggaagcggctaagacggctcctggaaagaagaggcctgtagagcagtctcctcaggaaccggactcctccgcgggtattggcaaatcgggtgcacagcccgctaaaaagagactcaatttcggtcagactggcgacacagagtcagtcccagaccctcaaccaatcggagaacctcccgcagccccctcaggtgtgggatctcttacaatggcttcaggtggtggcgcaccagtggcagacaataacgaaggtgccgatggagtgggtagttcctcgggaaattggcattgcgattcccaatggctgggggacagagtcatcaccaccagcacccgaacctgggccctgcccacctacaacaatcacctctacaagcaaatctccaacagcacatctggaggatcttcaaatgacaacgcctacttcggctacagcaccccctgggggtattttgacttcaacagattccactgccacttctcaccacgtgactggcagcgactcatcaacaacaactggggattccggcctaagcgactcaacttcaagctcttcaacattcaggtcaaagaggttacggacaacaatggagtcaagaccatcgccaataaccttaccagcacggtccaggtcttcacggactcagactatcagctcccgtacgtgctcgggtcggctcacgagggctgcctcccgccgttcccagcggacgttttcatgattcctcagtacgggtatctgacgcttaatgatggaagccaggccgtgggtcgttcgtccttttactgcctggaatatttcccgtcgcaaatgctaagaacgggtaacaacttccagttcagctacgagtttgagaacgtacctttccatagcagctacgctcacagccaaagcctggaccgactaatgaatccactcatcgaccaatacttgtactatctctctagaactattaacggttctggacagaatcaacaaacgctaaaattcagtgtggccggacccagcaacatggctgtccagggaagaaactacatacctggacccagctaccgacaacaacgtgtctcaaccactgtgactcaaaacaacaacagcgaatttgcttggcctggagcttcttcttgggctctcaatggacgtaatagcttgatgaatcctggacctgctatggccagccacaaagaaggagaggaccgtttctttcctttgtctggatctttaatttttggcaaacaaggtaccggcagagacaacgtggatgcggacaaagtcatgataaccaacgaagaagaaattaaaactactaacccggtagcaacggagtcctatggacaagtggccacaaaccaccagagtgcgcaacagagaatcccacaggagtatgcccaagcacaaaccggttgggttcaaaaccaaggaatacttccgggtatggtttggcaggacagagatgtgtacctgcaaggacccatttgggccaaaattcctcacacggacggcaactttcacccttctccgctgatgggagggtttggaatgaagcacccgcctcctcagatcctcatcaaaaacacacctgtacctgcggatcctccaacggccttcaacaaggacaagctgaactctttcatcacccagtattctactggccaagtcagcgtggagatcgagtgggagctgcagaaggaaaacagcaagcgctggaacccggagatccagtacacttccaactattacaagtctaataatgttgaatttgctgttaatactgaaggtgtatatagtgaaccccgccccattggcaccagatacctgactcgtaatctg

SEQ ID NO: 148 - DNA, 2229 bp, Adeno-Associated Virus 9
  source 1..2229: mol_type = other DNA
atggctgccgatggttatcttccagattggctcgaggacaaccttagtgaaggaattcgcgagtggtgggctttgaaacctggagcccctcaacccaaggcaaatcaacaacatcaagacaacgctcgaggtcttgtgcttccgggttacaaataccttggacccggcaacggactcgacaagggggagccggtcaacgcagcagacgcggcggccctcgagcacgacaaggcctacgaccagcagctcaaggccggagacaacccgtacctcaagtacaaccacgccgacgccgagttccaggagcggctcaaagaagatacgtcttttgggggcaacctcgggcgagcagtcttccaggccaaaaagaggcttcttgaacctcttggtctggttgaggaagcggctaagacggctcctggaaagaagaggcctgtagagcagtctcctcaggaaccggactcctccgcgggtattggcaaatcgggtgcacagcccgctaaaaagagactcaatttcggtcagactggcgacacagagtcagtcccagaccctcaaccaatcggagaacctcccgcagccccctcaggtgtgggatctcttacaatggcttcaggtggtggcgcaccagtggcagacaataacgaaggtgccgatggagtgggtagttcctcgggaaattggcattgcgattcccaatggctgggggacagagtcatcaccaccagcacccgaacctgggccctgcccacctacaacaatcacctctacaagcaaatctccaacagcacatctggaggatcttcaaatgacaacgcctacttcggctacagcaccccctgggggtattttgacttcaacagattccactgccacttctcaccacgtgactggcagcgactcatcaacaacaactggggattccggcctaagcgactcaacttcaagctcttcaacattcaggtcaaagaggttacggacaacaatggagtcaagaccatcgccaataaccttaccagcacggtccaggtcttcacggactcagactatcagctcccgtacgtgctcgggtcggctcacgagggctgcctcccgccgttcccagcggacgttttcatgattcctcagtacgggtatctgacgcttaatgatggaagccaggccgtgggtcgttcgtccttttactgcctggaatatttcccgtcgcaaatgctaagaacgggtaacaacttccagttcagctacgagtttgagaacgtacctttccatagcagctacgctcacagccaaagcctggaccgactaatgaatccactcatcgaccaatacttgtactatctctctagaactattaacggttctggacagaatcaacaaacgctaaaattcagtgtggccggacccagcaacatggctgtccagggaagaaactacatacctggacccagctaccgacaacaacgtgtctcaaccactgtgactcaaaacaacaacagcgaatttgcttggcctggagcttcttcttgggctctcaatggacgtaatagcttgatgaatcctggacctgctatggccagccacaaagaaggagaggaccgtttctttcctttgtctggatctttaatttttggcaaacaaggtaccggcagagacaacgtggatgcggacaaagtcatgataaccaacgaagaagaaattaaaactactaacccggtagcaacggagtcctatggacaagtggccacaaaccaccagagtgctcaacaacgaataccacaggaatacgcgcaagctcagaccggttgggttcaaaaccaaggaatacttccgggtatggtttggcaggacagagatgtgtacctgcaaggacccatttgggccaaaattcctcacacggacggcaactttcacccttctccgctgatgggagggtttggaatgaagcacccgcctcctcagatcctcatcaaaaacacacctgtacctgcggatcctccaacggccttcaacaaggacaagctgaactctttcatcacccagtattctactggccaagtcagcgtggagatcgagtgggagctgcagaaggaaaacagcaagcgctggaacccggagatccagtacacttccaactattacaagtctaataatgttgaatttgctgttaatactgaaggtgtatatagtgaaccccgccccattggcaccagatacctgactcgtaatctg

SEQ ID NO: 149 - DNA, 2229 bp, Adeno-Associated Virus 9
  source 1..2229: mol_type = other DNA
atggctgccgatggttatcttccagattggctcgaggacaaccttagtgaaggaattcgcgagtggtgggctttgaaacctggagcccctcaacccaaggcaaatcaacaacatcaagacaacgctcgaggtcttgtgcttccgggttacaaataccttggacccggcaacggactcgacaagggggagccggtcaacgcagcagacgcggcggccctcgagcacgacaaggcctacgaccagcagctcaaggccggagacaacccgtacctcaagtacaaccacgccgacgccgagttccaggagcggctcaaagaagatacgtcttttgggggcaacctcgggcgagcagtcttccaggccaaaaagaggcttcttgaacctcttggtctggttgaggaagcggctaagacggctcctggaaagaagaggcctgtagagcagtctcctcaggaaccggactcctccgcgggtattggcaaatcgggtgcacagcccgctaaaaagagactcaatttcggtcagactggcgacacagagtcagtcccagaccctcaaccaatcggagaacctcccgcagccccctcaggtgtgggatctcttacaatggcttcaggtggtggcgcaccagtggcagacaataacgaaggtgccgatggagtgggtagttcctcgggaaattggcattgcgattcccaatggctgggggacagagtcatcaccaccagcacccgaacctgggccctgcccacctacaacaatcacctctacaagcaaatctccaacagcacatctggaggatcttcaaatgacaacgcctacttcggctacagcaccccctgggggtattttgacttcaacagattccactgccacttctcaccacgtgactggcagcgactcatcaacaacaactggggattccggcctaagcgactcaacttcaagctcttcaacattcaggtcaaagaggttacggacaacaatggagtcaagaccatcgccaataaccttaccagcacggtccaggtcttcacggactcagactatcagctcccgtacgtgctcgggtcggctcacgagggctgcctcccgccgttcccagcggacgttttcatgattcctcagtacgggtatctgacgcttaatgatggaagccaggccgtgggtcgttcgtccttttactgcctggaatatttcccgtcgcaaatgctaagaacgggtaacaacttccagttcagctacgagtttgagaacgtacctttccatagcagctacgctcacagccaaagcctggaccgactaatgaatccactcatcgaccaatacttgtactatctctctagaactattaacggttctggacagaatcaacaaacgctaaaattcagtgtggccggacccagcaacatggctgtccagggaagaaactacatacctggacccagctaccgacaacaacgtgtctcaaccactgtgactcaaaacaacaacagcgaatttgcttggcctggagcttcttcttgggctctcaatggacgtaatagcttgatgaatcctggacctgctatggccagccacaaagaaggagaggaccgtttctttcctttgtctggatctttaatttttggcaaacaaggtaccggcagagacaacgtggatgcggacaaagtcatgataaccaacgaagaagaaattaaaactactaacccggtagcaacggagtcctatggacaagtggccacaaaccaccagagtgcccagcaacgcataccgcaagaatacgctcaggcccagaccggttgggttcaaaaccaaggaatacttccgggtatggtttggcaggacagagatgtgtacctgcaaggacccatttgggccaaaattcctcacacggacggcaactttcacccttctccgctgatgggagggtttggaatgaagcacccgcctcctcagatcctcatcaaaaacacacctgtacctgcggatcctccaacggccttcaacaaggacaagctgaactctttcatcacccagtattctactggccaagtcagcgtggagatcgagtgggagctgcagaaggaaaacagcaagcgctggaacccggagatccagtacacttccaactattacaagtctaataatgttgaatttgctgttaatactgaaggtgtatatagtgaaccccgccccattggcaccagatacctgactcgtaatctg

SEQ ID NO: 150 - DNA, 2229 bp, Adeno-Associated Virus 9
  source 1..2229: mol_type = other DNA
atggctgccgatggttatcttccagattggctcgaggacaaccttagtgaaggaattcgcgagtggtgggctttgaaacctggagcccctcaacccaaggcaaatcaacaacatcaagacaacgctcgaggtcttgtgcttccgggttacaaataccttggacccggcaacggactcgacaagggggagccggtcaacgcagcagacgcggcggccctcgagcacgacaaggcctacgaccagcagctcaaggccggagacaacccgtacctcaagtacaaccacgccgacgccgagttccaggagcggctcaaagaagatacgtcttttgggggcaacctcgggcgagcagtcttccaggccaaaaagaggcttcttgaacctcttggtctggttgaggaagcggctaagacggctcctggaaagaagaggcctgtagagcagtctcctcaggaaccggactcctccgcgggtattggcaaatcgggtgcacagcccgctaaaaagagactcaatttcggtcagactggcgacacagagtcagtcccagaccctcaaccaatcggagaacctcccgcagccccctcaggtgtgggatctcttacaatggcttcaggtggtggcgcaccagtggcagacaataacgaaggtgccgatggagtgggtagttcctcgggaaattggcattgcgattcccaatggctgggggacagagtcatcaccaccagcacccgaacctgggccctgcccacctacaacaatcacctctacaagcaaatctccaacagcacatctggaggatcttcaaatgacaacgcctacttcggctacagcaccccctgggggtattttgacttcaacagattccactgccacttctcaccacgtgactggcagcgactcatcaacaacaactggggattccggcctaagcgactcaacttcaagctcttcaacattcaggtcaaagaggttacggacaacaatggagtcaagaccatcgccaataaccttaccagcacggtccaggtcttcacggactcagactatcagctcccgtacgtgctcgggtcggctcacgagggctgcctcccgccgttcccagcggacgttttcatgattcctcagtacgggtatctgacgcttaatgatggaagccaggccgtgggtcgttcgtccttttactgcctggaatatttcccgtcgcaaatgctaagaacgggtaacaacttccagttcagctacgagtttgagaacgtacctttccatagcagctacgctcacagccaaagcctggaccgactaatgaatccactcatcgaccaatacttgtactatctctctagaactattaacggttctggacagaatcaacaaacgctaaaattcagtgtggccggacccagcaacatggctgtccagggaagaaactacatacctggacccagctaccgacaacaacgtgtctcaaccactgtgactcaaaacaacaacagcgaatttgcttggcctggagcttcttcttgggctctcaatggacgtaatagcttgatgaatcctggacctgctatggccagccacaaagaaggagaggaccgtttctttcctttgtctggatctttaatttttggcaaacaaggtaccggcagagacaacgtggatgcggacaaagtcatgataaccaacgaagaagaaattaaaactactaacccggtagcaacggagtcctatggacaagtggccacaaaccaccagagtgctcagcaaagaatcccccaagaatatgcacaagcgcaaaccggttgggttcaaaaccaaggaatacttccgggtatggtttggcaggacagagatgtgtacctgcaaggacccatttgggccaaaattcctcacacggacggcaactttcacccttctccgctgatgggagggtttggaatgaagcacccgcctcctcagatcctcatcaaaaacacacctgtacctgcggatcctccaacggccttcaacaaggacaagctgaactctttcatcacccagtattctactggccaagtcagcgtggagatcgagtgggagctgcagaaggaaaacagcaagcgctggaacccggagatccagtacacttccaactattacaagtctaataatgttgaatttgctgttaatactgaaggtgtatatagtgaaccccgccccattggcaccagatacctgactcgtaatctg

SEQ ID NO: 151 - DNA, 2229 bp, Adeno-Associated Virus 9
  source 1..2229: mol_type = other DNA
atggctgccgatggttatcttccagattggctcgaggacaaccttagtgaaggaattcgcgagtggtgggctttgaaacctggagcccctcaacccaaggcaaatcaacaacatcaagacaacgctcgaggtcttgtgcttccgggttacaaataccttggacccggcaacggactcgacaagggggagccggtcaacgcagcagacgcggcggccctcgagcacgacaaggcctacgaccagcagctcaaggccggagacaacccgtacctcaagtacaaccacgccgacgccgagttccaggagcggctcaaagaagatacgtcttttgggggcaacctcgggcgagcagtcttccaggccaaaaagaggcttcttgaacctcttggtctggttgaggaagcggctaagacggctcctggaaagaagaggcctgtagagcagtctcctcaggaaccggactcctccgcgggtattggcaaatcgggtgcacagcccgctaaaaagagactcaatttcggtcagactggcgacacagagtcagtcccagaccctcaaccaatcggagaacctcccgcagccccctcaggtgtgggatctcttacaatggcttcaggtggtggcgcaccagtggcagacaataacgaaggtgccgatggagtgggtagttcctcgggaaattggcattgcgattcccaatggctgggggacagagtcatcaccaccagcacccgaacctgggccctgcccacctacaacaatcacctctacaagcaaatctccaacagcacatctggaggatcttcaaatgacaacgcctacttcggctacagcaccccctgggggtattttgacttcaacagattccactgccacttctcaccacgtgactggcagcgactcatcaacaacaactggggattccggcctaagcgactcaacttcaagctcttcaacattcaggtcaaagaggttacggacaacaatggagtcaagaccatcgccaataaccttaccagcacggtccaggtcttcacggactcagactatcagctcccgtacgtgctcgggtcggctcacgagggctgcctcccgccgttcccagcggacgttttcatgattcctcagtacgggtatctgacgcttaatgatggaagccaggccgtgggtcgttcgtccttttactgcctggaatatttcccgtcgcaaatgctaagaacgggtaacaacttccagttcagctacgagtttgagaacgtacctttccatagcagctacgctcacagccaaagcctggaccgactaatgaatccactcatcgaccaatacttgtactatctctctagaactattaacggttctggacagaatcaacaaacgctaaaattcagtgtggccggacccagcaacatggctgtccagggaagaaactacatacctggacccagctaccgacaacaacgtgtctcaaccactgtgactcaaaacaacaacagcgaatttgcttggcctggagcttcttcttgggctctcaatggacgtaatagcttgatgaatcctggacctgctatggccagccacaaagaaggagaggaccgtttctttcctttgtctggatctttaatttttggcaaacaaggtaccggcagagacaacgtggatgcggacaaagtcatgataaccaacgaagaagaaattaaaactactaacccggtagcaacggagtcctatggacaagtggccacaaaccaccagagtgctcagcgttcacaaccgcaagaacacgctcaagcgcagaccggttgggttcaaaaccaaggaatacttccgggtatggtttggcaggacagagatgtgtacctgcaaggacccatttgggccaaaattcctcacacggacggcaactttcacccttctccgctgatgggagggtttggaatgaagcacccgcctcctcagatcctcatcaaaaacacacctgtacctgcggatcctccaacggccttcaacaaggacaagctgaactctttcatcacccagtattctactggccaagtcagcgtggagatcgagtgggagctgcagaaggaaaacagcaagcgctggaacccggagatccagtacacttccaactattacaagtctaataatgttgaatttgctgttaatactgaaggtgtatatagtgaaccccgccccattggcaccagatacctgactcgtaatctg

SEQ ID NO: 152 - DNA, 2229 bp, Adeno-Associated Virus 9
  source 1..2229: mol_type = other DNA
atggctgccgatggttatcttccagattggctcgaggacaaccttagtgaaggaattcgcgagtggtgggctttgaaacctggagcccctcaacccaaggcaaatcaacaacatcaagacaacgctcgaggtcttgtgcttccgggttacaaataccttggacccggcaacggactcgacaagggggagccggtcaacgcagcagacgcggcggccctcgagcacgacaaggcctacgaccagcagctcaaggccggagacaacccgtacctcaagtacaaccacgccgacgccgagttccaggagcggctcaaagaagatacgtcttttgggggcaacctcgggcgagcagtcttccaggccaaaaagaggcttcttgaacctcttggtctggttgaggaagcggctaagacggctcctggaaagaagaggcctgtagagcagtctcctcaggaaccggactcctccgcgggtattggcaaatcgggtgcacagcccgctaaaaagagactcaatttcggtcagactggcgacacagagtcagtcccagaccctcaaccaatcggagaacctcccgcagccccctcaggtgtgggatctcttacaatggcttcaggtggtggcgcaccagtggcagacaataacgaaggtgccgatggagtgggtagttcctcgggaaattggcattgcgattcccaatggctgggggacagagtcatcaccaccagcacccgaacctgggccctgcccacctacaacaatcacctctacaagcaaatctccaacagcacatctggaggatcttcaaatgacaacgcctacttcggctacagcaccccctgggggtattttgacttcaacagattccactgccacttctcaccacgtgactggcagcgactcatcaacaacaactggggattccggcctaagcgactcaacttcaagctcttcaacattcaggtcaaagaggttacggacaacaatggagtcaagaccatcgccaataaccttaccagcacggtccaggtcttcacggactcagactatcagctcccgtacgtgctcgggtcggctcacgagggctgcctcccgccgttcccagcggacgttttcatgattcctcagtacgggtatctgacgcttaatgatggaagccaggccgtgggtcgttcgtccttttactgcctggaatatttcccgtcgcaaatgctaagaacgggtaacaacttccagttcagctacgagtttgagaacgtacctttccatagcagctacgctcacagccaaagcctggaccgactaatgaatccactcatcgaccaatacttgtactatctctctagaactattaacggttctggacagaatcaacaaacgctaaaattcagtgtggccggacccagcaacatggctgtccagggaagaaactacatacctggacccagctaccgacaacaacgtgtctcaaccactgtgactcaaaacaacaacagcgaatttgcttggcctggagcttcttcttgggctctcaatggacgtaatagcttgatgaatcctggacctgctatggccagccacaaagaaggagaggaccgtttctttcctttgtctggatctttaatttttggcaaacaaggtaccggcagagacaacgtggatgcggacaaagtcatgataaccaacgaagaagaaattaaaactactaacccggtagcaacggagtcctatggacaagtggccacaaaccaccagagtgcacagagaagtcagccacaggaacatgcacaggcccagaccggttgggttcaaaaccaaggaatacttccgggtatggtttggcaggacagagatgtgtacctgcaaggacccatttgggccaaaattcctcacacggacggcaactttcacccttctccgctgatgggagggtttggaatgaagcacccgcctcctcagatcctcatcaaaaacacacctgtacctgcggatcctccaacggccttcaacaaggacaagctgaactctttcatcacccagtattctactggccaagtcagcgtggagatcgagtgggagctgcagaaggaaaacagcaagcgctggaacccggagatccagtacacttccaactattacaagtctaataatgttgaatttgctgttaatactgaaggtgtatatagtgaaccccgccccattggcaccagatacctgactcgtaatctg

SEQ ID NO: 153 - DNA, 2229 bp, Adeno-Associated Virus 9
  source 1..2229: mol_type = other DNA
atggctgccgatggttatcttccagattggctcgaggacaaccttagtgaaggaattcgcgagtggtgggctttgaaacctggagcccctcaacccaaggcaaatcaacaacatcaagacaacgctcgaggtcttgtgcttccgggttacaaataccttggacccggcaacggactcgacaagggggagccggtcaacgcagcagacgcggcggccctcgagcacgacaaggcctacgaccagcagctcaaggccggagacaacccgtacctcaagtacaaccacgccgacgccgagttccaggagcggctcaaagaagatacgtcttttgggggcaacctcgggcgagcagtcttccaggccaaaaagaggcttcttgaacctcttggtctggttgaggaagcggctaagacggctcctggaaagaagaggcctgtagagcagtctcctcaggaaccggactcctccgcgggtattggcaaatcgggtgcacagcccgctaaaaagagactcaatttcggtcagactggcgacacagagtcagtcccagaccctcaaccaatcggagaacctcccgcagccccctcaggtgtgggatctcttacaatggcttcaggtggtggcgcaccagtggcagacaataacgaaggtgccgatggagtgggtagttcctcgggaaattggcattgcgattcccaatggctgggggacagagtcatcaccaccagcacccgaacctgggccctgcccacctacaacaatcacctctacaagcaaatctccaacagcacatctggaggatcttcaaatgacaacgcctacttcggctacagcaccccctgggggtattttgacttcaacagattccactgccacttctcaccacgtgactggcagcgactcatcaacaacaactggggattccggcctaagcgactcaacttcaagctcttcaacattcaggtcaaagaggttacggacaacaatggagtcaagaccatcgccaataaccttaccagcacggtccaggtcttcacggactcagactatcagctcccgtacgtgctcgggtcggctcacgagggctgcctcccgccgttcccagcggacgttttcatgattcctcagtacgggtatctgacgcttaatgatggaagccaggccgtgggtcgttcgtccttttactgcctggaatatttcccgtcgcaaatgctaagaacgggtaacaacttccagttcagctacgagtttgagaacgtacctttccatagcagctacgctcacagccaaagcctggaccgactaatgaatccactcatcgaccaatacttgtactatctctctagaactattaacggttctggacagaatcaacaaacgctaaaattcagtgtggccggacccagcaacatggctgtccagggaagaaactacatacctggacccagctaccgacaacaacgtgtctcaaccactgtgactcaaaacaacaacagcgaatttgcttggcctggagcttcttcttgggctctcaatggacgtaatagcttgatgaatcctggacctgctatggccagccacaaagaaggagaggaccgtttctttcctttgtctggatctttaatttttggcaaacaaggtaccggcagagacaacgtggatgcggacaaagtcatgataaccaacgaagaagaaattaaaactactaacccggtagcaacggagtcctatggacaagtggccacaaaccaccagagtgcgcaacggtcacaaccgcaagagcacgcccaagcacaaaccggttgggttcaaaaccaaggaatacttccgggtatggtttggcaggacagagatgtgtacctgcaaggacccatttgggccaaaattcctcacacggacggcaactttcacccttctccgctgatgggagggtttggaatgaagcacccgcctcctcagatcctcatcaaaaacacacctgtacctgcggatcctccaacggccttcaacaaggacaagctgaactctttcatcacccagtattctactggccaagtcagcgtggagatcgagtgggagctgcagaaggaaaacagcaagcgctggaacccggagatccagtacacttccaactattacaagtctaataatgttgaatttgctgttaatactgaaggtgtatatagtgaaccccgccccattggcaccagatacctgactcgtaatctg

SEQ ID NO: 154 - DNA, 2229 bp, Adeno-Associated Virus 9
  source 1..2229: mol_type = other DNA
atggctgccgatggttatcttccagattggctcgaggacaaccttagtgaaggaattcgcgagtggtgggctttgaaacctggagcccctcaacccaaggcaaatcaacaacatcaagacaacgctcgaggtcttgtgcttccgggttacaaataccttggacccggcaacggactcgacaagggggagccggtcaacgcagcagacgcggcggccctcgagcacgacaaggcctacgaccagcagctcaaggccggagacaacccgtacctcaagtacaaccacgccgacgccgagttccaggagcggctcaaagaagatacgtcttttgggggcaacctcgggcgagcagtcttccaggccaaaaagaggcttcttgaacctcttggtctggttgaggaagcggctaagacggctcctggaaagaagaggcctgtagagcagtctcctcaggaaccggactcctccgcgggtattggcaaatcgggtgcacagcccgctaaaaagagactcaatttcggtcagactggcgacacagagtcagtcccagaccctcaaccaatcggagaacctcccgcagccccctcaggtgtgggatctcttacaatggcttcaggtggtggcgcaccagtggcagacaataacgaaggtgccgatggagtgggtagttcctcgggaaattggcattgcgattcccaatggctgggggacagagtcatcaccaccagcacccgaacctgggccctgcccacctacaacaatcacctctacaagcaaatctccaacagcacatctggaggatcttcaaatgacaacgcctacttcggctacagcaccccctgggggtattttgacttcaacagattccactgccacttctcaccacgtgactggcagcgactcatcaacaacaactggggattccggcctaagcgactcaacttcaagctcttcaacattcaggtcaaagaggttacggacaacaatggagtcaagaccatcgccaataaccttaccagcacggtccaggtcttcacggactcagactatcagctcccgtacgtgctcgggtcggctcacgagggctgcctcccgccgttcccagcggacgttttcatgattcctcagtacgggtatctgacgcttaatgatggaagccaggccgtgggtcgttcgtccttttactgcctggaatatttcccgtcgcaaatgctaagaacgggtaacaacttccagttcagctacgagtttgagaacgtacctttccatagcagctacgctcacagccaaagcctggaccgactaatgaatccactcatcgaccaatacttgtactatctctctagaactattaacggttctggacagaatcaacaaacgctaaaattcagtgtggccggacccagcaacatggctgtccagggaagaaactacatacctggacccagctaccgacaacaacgtgtctcaaccactgtgactcaaaacaacaacagcgaatttgcttggcctggagcttcttcttgggctctcaatggacgtaatagcttgatgaatcctggacctgctatggccagccacaaagaaggagaggaccgtttctttcctttgtctggatctttaatttttggcaaacaaggtaccggcagagacaacgtggatgcggacaaagtcatgataaccaacgaagaagaaattaaaactactaacccggtagcaacggagtcctatggacaagtggccacaaaccaccagagtgctcagcgtagtcaaccccaagagcatgcgcaagctcaaaccggttgggttcaaaaccaaggaatacttccgggtatggtttggcaggacagagatgtgtacctgcaaggacccatttgggccaaaattcctcacacggacggcaactttcacccttctccgctgatgggagggtttggaatgaagcacccgcctcctcagatcctcatcaaaaacacacctgtacctgcggatcctccaacggccttcaacaaggacaagctgaactctttcatcacccagtattctactggccaagtcagcgtggagatcgagtgggagctgcagaaggaaaacagcaagcgctggaacccggagatccagtacacttccaactattacaagtctaataatgttgaatttgctgttaatactgaaggtgtatatagtgaaccccgccccattggcaccagatacctgactcgtaatctg

SEQ ID NO: 155 - DNA, 2229 bp, Adeno-Associated Virus 9
  source 1..2229: mol_type = other DNA
atggctgccgatggttatcttccagattggctcgaggacaaccttagtgaaggaattcgcgagtggtgggctttgaaacctggagcccctcaacccaaggcaaatcaacaacatcaagacaacgctcgaggtcttgtgcttccgggttacaaataccttggacccggcaacggactcgacaagggggagccggtcaacgcagcagacgcggcggccctcgagcacgacaaggcctacgaccagcagctcaaggccggagacaacccgtacctcaagtacaaccacgccgacgccgagttccaggagcggctcaaagaagatacgtcttttgggggcaacctcgggcgagcagtcttccaggccaaaaagaggcttcttgaacctcttggtctggttgaggaagcggctaagacggctcctggaaagaagaggcctgtagagcagtctcctcaggaaccggactcctccgcgggtattggcaaatcgggtgcacagcccgctaaaaagagactcaatttcggtcagactggcgacacagagtcagtcccagaccctcaaccaatcggagaacctcccgcagccccctcaggtgtgggatctcttacaatggcttcaggtggtggcgcaccagtggcagacaataacgaaggtgccgatggagtgggtagttcctcgggaaattggcattgcgattcccaatggctgggggacagagtcatcaccaccagcacccgaacctgggccctgcccacctacaacaatcacctctacaagcaaatctccaacagcacatctggaggatcttcaaatgacaacgcctacttcggctacagcaccccctgggggtattttgacttcaacagattccactgccacttctcaccacgtgactggcagcgactcatcaacaacaactggggattccggcctaagcgactcaacttcaagctcttcaacattcaggtcaaagaggttacggacaacaatggagtcaagaccatcgccaataaccttaccagcacggtccaggtcttcacggactcagactatcagctcccgtacgtgctcgggtcggctcacgagggctgcctcccgccgttcccagcggacgttttcatgattcctcagtacgggtatctgacgcttaatgatggaagccaggccgtgggtcgttcgtccttttactgcctggaatatttcccgtcgcaaatgctaagaacgggtaacaacttccagttcagctacgagtttgagaacgtacctttccatagcagctacgctcacagccaaagcctggaccgactaatgaatccactcatcgaccaatacttgtactatctctctagaactattaacggttctggacagaatcaacaaacgctaaaattcagtgtggccggacccagcaacatggctgtccagggaagaaactacatacctggacccagctaccgacaacaacgtgtctcaaccactgtgactcaaaacaacaacagcgaatttgcttggcctggagcttcttcttgggctctcaatggacgtaatagcttgatgaatcctggacctgctatggccagccacaaagaaggagaggaccgtttctttcctttgtctggatctttaatttttggcaaacaaggtaccggcagagacaacgtggatgcggacaaagtcatgataaccaacgaagaagaaattaaaactactaacccggtagcaacggagtcctatggacaagtggccacaaaccaccagagtgcccaaagaagccagcctcaggaacacgctcaggcgcagaccggttgggttcaaaaccaaggaatacttccgggtatggtttggcaggacagagatgtgtacctgcaaggacccatttgggccaaaattcctcacacggacggcaactttcacccttctccgctgatgggagggtttggaatgaagcacccgcctcctcagatcctcatcaaaaacacacctgtacctgcggatcctccaacggccttcaacaaggacaagctgaactctttcatcacccagtattctactggccaagtcagcgtggagatcgagtgggagctgcagaaggaaaacagcaagcgctggaacccggagatccagtacacttccaactattacaagtctaataatgttgaatttgctgttaatactgaaggtgtatatagtgaaccccgccccattggcaccagatacctgactcgtaatctg

SEQ ID NO: 156 - DNA, 2229 bp, Adeno-Associated Virus 9
  source 1..2229: mol_type = other DNA
atggctgccgatggttatcttccagattggctcgaggacaaccttagtgaaggaattcgcgagtggtgggctttgaaacctggagcccctcaacccaaggcaaatcaacaacatcaagacaacgctcgaggtcttgtgcttccgggttacaaataccttggacccggcaacggactcgacaagggggagccggtcaacgcagcagacgcggcggccctcgagcacgacaaggcctacgaccagcagctcaaggccggagacaacccgtacctcaagtacaaccacgccgacgccgagttccaggagcggctcaaagaagatacgtcttttgggggcaacctcgggcgagcagtcttccaggccaaaaagaggcttcttgaacctcttggtctggttgaggaagcggctaagacggctcctggaaagaagaggcctgtagagcagtctcctcaggaaccggactcctccgcgggtattggcaaatcgggtgcacagcccgctaaaaagagactcaatttcggtcagactggcgacacagagtcagtcccagaccctcaaccaatcggagaacctcccgcagccccctcaggtgtgggatctcttacaatggcttcaggtggtggcgcaccagtggcagacaataacgaaggtgccgatggagtgggtagttcctcgggaaattggcattgcgattcccaatggctgggggacagagtcatcaccaccagcacccgaacctgggccctgcccacctacaacaatcacctctacaagcaaatctccaacagcacatctggaggatcttcaaatgacaacgcctacttcggctacagcaccccctgggggtattttgacttcaacagattccactgccacttctcaccacgtgactggcagcgactcatcaacaacaactggggattccggcctaagcgactcaacttcaagctcttcaacattcaggtcaaagaggttacggacaacaatggagtcaagaccatcgccaataaccttaccagcacggtccaggtcttcacggactcagactatcagctcccgtacgtgctcgggtcggctcacgagggctgcctcccgccgttcccagcggacgttttcatgattcctcagtacgggtatctgacgcttaatgatggaagccaggccgtgggtcgttcgtccttttactgcctggaatatttcccgtcgcaaatgctaagaacgggtaacaacttccagttcagctacgagtttgagaacgtacctttccatagcagctacgctcacagccaaagcctggaccgactaatgaatccactcatcgaccaatacttgtactatctctctagaactattaacggttctggacagaatcaacaaacgctaaaattcagtgtggccggacccagcaacatggctgtccagggaagaaactacatacctggacccagctaccgacaacaacgtgtctcaaccactgtgactcaaaacaacaacagcgaatttgcttggcctggagcttcttcttgggctctcaatggacgtaatagcttgatgaatcctggacctgctatggccagccacaaagaaggagaggaccgtttctttcctttgtctggatctttaatttttggcaaacaaggtaccggcagagacaacgtggatgcggacaaagtcatgataaccaacgaagaagaaattaaaactactaacccggtagcaacggagtcctatggacaagtggccacaaaccaccagagtgcgcaacgatctcagcctcaggagcatgcccaggcacaaaccggttgggttcaaaaccaaggaatacttccgggtatggtttggcaggacagagatgtgtacctgcaaggacccatttgggccaaaattcctcacacggacggcaactttcacccttctccgctgatgggagggtttggaatgaagcacccgcctcctcagatcctcatcaaaaacacacctgtacctgcggatcctccaacggccttcaacaaggacaagctgaactctttcatcacccagtattctactggccaagtcagcgtggagatcgagtgggagctgcagaaggaaaacagcaagcgctggaacccggagatccagtacacttccaactattacaagtctaataatgttgaatttgctgttaatactgaaggtgtatatagtgaaccccgccccattggcaccagatacctgactcgtaatctg

SEQ ID NO: 157 - DNA, 2229 bp, Adeno-Associated Virus 9
  source 1..2229: mol_type = other DNA
atggctgccgatggttatcttccagattggctcgaggacaaccttagtgaaggaattcgcgagtggtgggctttgaaacctggagcccctcaacccaaggcaaatcaacaacatcaagacaacgctcgaggtcttgtgcttccgggttacaaataccttggacccggcaacggactcgacaagggggagccggtcaacgcagcagacgcggcggccctcgagcacgacaaggcctacgaccagcagctcaaggccggagacaacccgtacctcaagtacaaccacgccgacgccgagttccaggagcggctcaaagaagatacgtcttttgggggcaacctcgggcgagcagtcttccaggccaaaaagaggcttcttgaacctcttggtctggttgaggaagcggctaagacggctcctggaaagaagaggcctgtagagcagtctcctcaggaaccggactcctccgcgggtattggcaaatcgggtgcacagcccgctaaaaagagactcaatttcggtcagactggcgacacagagtcagtcccagaccctcaaccaatcggagaacctcccgcagccccctcaggtgtgggatctcttacaatggcttcaggtggtggcgcaccagtggcagacaataacgaaggtgccgatggagtgggtagttcctcgggaaattggcattgcgattcccaatggctgggggacagagtcatcaccaccagcacccgaacctgggccctgcccacctacaacaatcacctctacaagcaaatctccaacagcacatctggaggatcttcaaatgacaacgcctacttcggctacagcaccccctgggggtattttgacttcaacagattccactgccacttctcaccacgtgactggcagcgactcatcaacaacaactggggattccggcctaagcgactcaacttcaagctcttcaacattcaggtcaaagaggttacggacaacaatggagtcaagaccatcgccaataaccttaccagcacggtccaggtcttcacggactcagactatcagctcccgtacgtgctcgggtcggctcacgagggctgcctcccgccgttcccagcggacgttttcatgattcctcagtacgggtatctgacgcttaatgatggaagccaggccgtgggtcgttcgtccttttactgcctggaatatttcccgtcgcaaatgctaagaacgggtaacaacttccagttcagctacgagtttgagaacgtacctttccatagcagctacgctcacagccaaagcctggaccgactaatgaatccactcatcgaccaatacttgtactatctctctagaactattaacggttctggacagaatcaacaaacgctaaaattcagtgtggccggacccagcaacatggctgtccagggaagaaactacatacctggacccagctaccgacaacaacgtgtctcaaccactgtgactcaaaacaacaacagcgaatttgcttggcctggagcttcttcttgggctctcaatggacgtaatagcttgatgaatcctggacctgctatggccagccacaaagaaggagaggaccgtttctttcctttgtctggatctttaatttttggcaaacaaggtaccggcagagacaacgtggatgcggacaaagtcatgataaccaacgaagaagaaattaaaactactaacccggtagcaacggagtcctatggacaagtggccacaaaccaccagagtgcccaacgctctcagccacaagagcatgcccaagcacagaccggttgggttcaaaaccaaggaatacttccgggtatggtttggcaggacagagatgtgtacctgcaaggacccatttgggccaaaattcctcacacggacggcaactttcacccttctccgctgatgggagggtttggaatgaagcacccgcctcctcagatcctcatcaaaaacacacctgtacctgcggatcctccaacggccttcaacaaggacaagctgaactctttcatcacccagtattctactggccaagtcagcgtggagatcgagtgggagctgcagaaggaaaacagcaagcgctggaacccggagatccagtacacttccaactattacaagtctaataatgttgaatttgctgttaatactgaaggtgtatatagtgaaccccgccccattggcaccagatacctgactcgtaatctg

SEQ ID NO: 158 - DNA, 2229 bp, Adeno-Associated Virus 9
  source 1..2229: mol_type = other DNA
atggctgccgatggttatcttccagattggctcgaggacaaccttagtgaaggaattcgcgagtggtgggctttgaaacctggagcccctcaacccaaggcaaatcaacaacatcaagacaacgctcgaggtcttgtgcttccgggttacaaataccttggacccggcaacggactcgacaagggggagccggtcaacgcagcagacgcggcggccctcgagcacgacaaggcctacgaccagcagctcaaggccggagacaacccgtacctcaagtacaaccacgccgacgccgagttccaggagcggctcaaagaagatacgtcttttgggggcaacctcgggcgagcagtcttccaggccaaaaagaggcttcttgaacctcttggtctggttgaggaagcggctaagacggctcctggaaagaagaggcctgtagagcagtctcctcaggaaccggactcctccgcgggtattggcaaatcgggtgcacagcccgctaaaaagagactcaatttcggtcagactggcgacacagagtcagtcccagaccctcaaccaatcggagaacctcccgcagccccctcaggtgtgggatctcttacaatggcttcaggtggtggcgcaccagtggcagacaataacgaaggtgccgatggagtgggtagttcctcgggaaattggcattgcgattcccaatggctgggggacagagtcatcaccaccagcacccgaacctgggccctgcccacctacaacaatcacctctacaagcaaatctccaacagcacatctggaggatcttcaaatgacaacgcctacttcggctacagcaccccctgggggtattttgacttcaacagattccactgccacttctcaccacgtgactggcagcgactcatcaacaacaactggggattccggcctaagcgactcaacttcaagctcttcaacattcaggtcaaagaggttacggacaacaatggagtcaagaccatcgccaataaccttaccagcacggtccaggtcttcacggactcagactatcagctcccgtacgtgctcgggtcggctcacgagggctgcctcccgccgttcccagcggacgttttcatgattcctcagtacgggtatctgacgcttaatgatggaagccaggccgtgggtcgttcgtccttttactgcctggaatatttcccgtcgcaaatgctaagaacgggtaacaacttccagttcagctacgagtttgagaacgtacctttccatagcagctacgctcacagccaaagcctggaccgactaatgaatccactcatcgaccaatacttgtactatctctctagaactattaacggttctggacagaatcaacaaacgctaaaattcagtgtggccggacccagcaacatggctgtccagggaagaaactacatacctggacccagctaccgacaacaacgtgtctcaaccactgtgactcaaaacaacaacagcgaatttgcttggcctggagcttcttcttgggctctcaatggacgtaatagcttgatgaatcctggacctgctatggccagccacaaagaaggagaggaccgtttctttcctttgtctggatctttaatttttggcaaacaaggtaccggcagagacaacgtggatgcggacaaagtcatgataaccaacgaagaagaaattaaaactactaacccggtagcaacggagtcctatggacaagtggccacaaaccaccagagtgcgcagcggagccaacctcaagagcacgcgcaagcccagaccggttgggttcaaaaccaaggaatacttccgggtatggtttggcaggacagagatgtgtacctgcaaggacccatttgggccaaaattcctcacacggacggcaactttcacccttctccgctgatgggagggtttggaatgaagcacccgcctcctcagatcctcatcaaaaacacacctgtacctgcggatcctccaacggccttcaacaaggacaagctgaactctttcatcacccagtattctactggccaagtcagcgtggagatcgagtgggagctgcagaaggaaaacagcaagcgctggaacccggagatccagtacacttccaactattacaagtctaataatgttgaatttgctgttaatactgaaggtgtatatagtgaaccccgccccattggcaccagatacctgactcgtaatctg

SEQ ID NO: 159 - DNA, 2229 bp, Adeno-Associated Virus 9
  source 1..2229: mol_type = other DNA
atggctgccgatggttatcttccagattggctcgaggacaaccttagtgaaggaattcgcgagtggtgggctttgaaacctggagcccctcaacccaaggcaaatcaacaacatcaagacaacgctcgaggtcttgtgcttccgggttacaaataccttggacccggcaacggactcgacaagggggagccggtcaacgcagcagacgcggcggccctcgagcacgacaaggcctacgaccagcagctcaaggccggagacaacccgtacctcaagtacaaccacgccgacgccgagttccaggagcggctcaaagaagatacgtcttttgggggcaacctcgggcgagcagtcttccaggccaaaaagaggcttcttgaacctcttggtctggttgaggaagcggctaagacggctcctggaaagaagaggcctgtagagcagtctcctcaggaaccggactcctccgcgggtattggcaaatcgggtgcacagcccgctaaaaagagactcaatttcggtcagactggcgacacagagtcagtcccagaccctcaaccaatcggagaacctcccgcagccccctcaggtgtgggatctcttacaatggcttcaggtggtggcgcaccagtggcagacaataacgaaggtgccgatggagtgggtagttcctcgggaaattggcattgcgattcccaatggctgggggacagagtcatcaccaccagcacccgaacctgggccctgcccacctacaacaatcacctctacaagcaaatctccaacagcacatctggaggatcttcaaatgacaacgcctacttcggctacagcaccccctgggggtattttgacttcaacagattccactgccacttctcaccacgtgactggcagcgactcatcaacaacaactggggattccggcctaagcgactcaacttcaagctcttcaacattcaggtcaaagaggttacggacaacaatggagtcaagaccatcgccaataaccttaccagcacggtccaggtcttcacggactcagactatcagctcccgtacgtgctcgggtcggctcacgagggctgcctcccgccgttcccagcggacgttttcatgattcctcagtacgggtatctgacgcttaatgatggaagccaggccgtgggtcgttcgtccttttactgcctggaatatttcccgtcgcaaatgctaagaacgggtaacaacttccagttcagctacgagtttgagaacgtacctttccatagcagctacgctcacagccaaagcctggaccgactaatgaatccactcatcgaccaatacttgtactatctctctagaactattaacggttctggacagaatcaacaaacgctaaaattcagtgtggccggacccagcaacatggctgtccagggaagaaactacatacctggacccagctaccgacaacaacgtgtctcaaccactgtgactcaaaacaacaacagcgaatttgcttggcctggagcttcttcttgggctctcaatggacgtaatagcttgatgaatcctggacctgctatggccagccacaaagaaggagaggaccgtttctttcctttgtctggatctttaatttttggcaaacaaggtaccggcagagacaacgtggatgcggacaaagtcatgataaccaacgaagaagaaattaaaactactaacccggtagcaacggagtcctatggacaagtggccacaaaccaccagagtgcgcagagaagccaaccgcaggaacacgcgcaggcgcaaaccggttgggttcaaaaccaaggaatacttccgggtatggtttggcaggacagagatgtgtacctgcaaggacccatttgggccaaaattcctcacacggacggcaactttcacccttctccgctgatgggagggtttggaatgaagcacccgcctcctcagatcctcatcaaaaacacacctgtacctgcggatcctccaacggccttcaacaaggacaagctgaactctttcatcacccagtattctactggccaagtcagcgtggagatcgagtgggagctgcagaaggaaaacagcaagcgctggaacccggagatccagtacacttccaactattacaagtctaataatgttgaatttgctgttaatactgaaggtgtatatagtgaaccccgccccattggcaccagatacctgactcgtaatctg

SEQ ID NO: 160 - DNA, 2229 bp, Adeno-Associated Virus 9
  source 1..2229: mol_type = other DNA
atggctgccgatggttatcttccagattggctcgaggacaaccttagtgaaggaattcgcgagtggtgggctttgaaacctggagcccctcaacccaaggcaaatcaacaacatcaagacaacgctcgaggtcttgtgcttccgggttacaaataccttggacccggcaacggactcgacaagggggagccggtcaacgcagcagacgcggcggccctcgagcacgacaaggcctacgaccagcagctcaaggccggagacaacccgtacctcaagtacaaccacgccgacgccgagttccaggagcggctcaaagaagatacgtcttttgggggcaacctcgggcgagcagtcttccaggccaaaaagaggcttcttgaacctcttggtctggttgaggaagcggctaagacggctcctggaaagaagaggcctgtagagcagtctcctcaggaaccggactcctccgcgggtattggcaaatcgggtgcacagcccgctaaaaagagactcaatttcggtcagactggcgacacagagtcagtcccagaccctcaaccaatcggagaacctcccgcagccccctcaggtgtgggatctcttacaatggcttcaggtggtggcgcaccagtggcagacaataacgaaggtgccgatggagtgggtagttcctcgggaaattggcattgcgattcccaatggctgggggacagagtcatcaccaccagcacccgaacctgggccctgcccacctacaacaatcacctctacaagcaaatctccaacagcacatctggaggatcttcaaatgacaacgcctacttcggctacagcaccccctgggggtattttgacttcaacagattccactgccacttctcaccacgtgactggcagcgactcatcaacaacaactggggattccggcctaagcgactcaacttcaagctcttcaacattcaggtcaaagaggttacggacaacaatggagtcaagaccatcgccaataaccttaccagcacggtccaggtcttcacggactcagactatcagctcccgtacgtgctcgggtcggctcacgagggctgcctcccgccgttcccagcggacgttttcatgattcctcagtacgggtatctgacgcttaatgatggaagccaggccgtgggtcgttcgtccttttactgcctggaatatttcccgtcgcaaatgctaagaacgggtaacaacttccagttcagctacgagtttgagaacgtacctttccatagcagctacgctcacagccaaagcctggaccgactaatgaatccactcatcgaccaatacttgtactatctctctagaactattaacggttctggacagaatcaacaaacgctaaaattcagtgtggccggacccagcaacatggctgtccagggaagaaactacatacctggacccagctaccgacaacaacgtgtctcaaccactgtgactcaaaacaacaacagcgaatttgcttggcctggagcttcttcttgggctctcaatggacgtaatagcttgatgaatcctggacctgctatggccagccacaaagaaggagaggaccgtttctttcctttgtctggatctttaatttttggcaaacaaggtaccggcagagacaacgtggatgcggacaaagtcatgataaccaacgaagaagaaattaaaactactaacccggtagcaacggagtcctatggacaagtggccacaaaccaccagagtgcccaacgtagtcagccacaggaacatgcacaggcacaaaccggttgggttcaaaaccaaggaatacttccgggtatggtttggcaggacagagatgtgtacctgcaaggacccatttgggccaaaattcctcacacggacggcaactttcacccttctccgctgatgggagggtttggaatgaagcacccgcctcctcagatcctcatcaaaaacacacctgtacctgcggatcctccaacggccttcaacaaggacaagctgaactctttcatcacccagtattctactggccaagtcagcgtggagatcgagtgggagctgcagaaggaaaacagcaagcgctggaacccggagatccagtacacttccaactattacaagtctaataatgttgaatttgctgttaatactgaaggtgtatatagtgaaccccgccccattggcaccagatacctgactcgtaatctg

SEQ ID NO: 161 - DNA, 2229 bp, Adeno-Associated Virus 9
  source 1..2229: mol_type = other DNA
atggctgccgatggttatcttccagattggctcgaggacaaccttagtgaaggaattcgcgagtggtgggctttgaaacctggagcccctcaacccaaggcaaatcaacaacatcaagacaacgctcgaggtcttgtgcttccgggttacaaataccttggacccggcaacggactcgacaagggggagccggtcaacgcagcagacgcggcggccctcgagcacgacaaggcctacgaccagcagctcaaggccggagacaacccgtacctcaagtacaaccacgccgacgccgagttccaggagcggctcaaagaagatacgtcttttgggggcaacctcgggcgagcagtcttccaggccaaaaagaggcttcttgaacctcttggtctggttgaggaagcggctaagacggctcctggaaagaagaggcctgtagagcagtctcctcaggaaccggactcctccgcgggtattggcaaatcgggtgcacagcccgctaaaaagagactcaatttcggtcagactggcgacacagagtcagtcccagaccctcaaccaatcggagaacctcccgcagccccctcaggtgtgggatctcttacaatggcttcaggtggtggcgcaccagtggcagacaataacgaaggtgccgatggagtgggtagttcctcgggaaattggcattgcgattcccaatggctgggggacagagtcatcaccaccagcacccgaacctgggccctgcccacctacaacaatcacctctacaagcaaatctccaacagcacatctggaggatcttcaaatgacaacgcctacttcggctacagcaccccctgggggtattttgacttcaacagattccactgccacttctcaccacgtgactggcagcgactcatcaacaacaactggggattccggcctaagcgactcaacttcaagctcttcaacattcaggtcaaagaggttacggacaacaatggagtcaagaccatcgccaataaccttaccagcacggtccaggtcttcacggactcagactatcagctcccgtacgtgctcgggtcggctcacgagggctgcctcccgccgttcccagcggacgttttcatgattcctcagtacgggtatctgacgcttaatgatggaagccaggccgtgggtcgttcgtccttttactgcctggaatatttcccgtcgcaaatgctaagaacgggtaacaacttccagttcagctacgagtttgagaacgtacctttccatagcagctacgctcacagccaaagcctggaccgactaatgaatccactcatcgaccaatacttgtactatctctctagaactattaacggttctggacagaatcaacaaacgctaaaattcagtgtggccggacccagcaacatggctgtccagggaagaaactacatacctggacccagctaccgacaacaacgtgtctcaaccactgtgactcaaaacaacaacagcgaatttgcttggcctggagcttcttcttgggctctcaatggacgtaatagcttgatgaatcctggacctgctatggccagccacaaagaaggagaggaccgtttctttcctttgtctggatctttaatttttggcaaacaaggtaccggcagagacaacgtggatgcggacaaagtcatgataaccaacgaagaagaaattaaaactactaacccggtagcaacggagtcctatggacaagtggccacaaaccaccagagtgcccaaacagctcgtccaaacgagtacgcacaagcacaaaccggttgggttcaaaaccaaggaatacttccgggtatggtttggcaggacagagatgtgtacctgcaaggacccatttgggccaaaattcctcacacggacggcaactttcacccttctccgctgatgggagggtttggaatgaagcacccgcctcctcagatcctcatcaaaaacacacctgtacctgcggatcctccaacggccttcaacaaggacaagctgaactctttcatcacccagtattctactggccaagtcagcgtggagatcgagtgggagctgcagaaggaaaacagcaagcgctggaacccggagatccagtacacttccaactattacaagtctaataatgttgaatttgctgttaatactgaaggtgtatatagtgaaccccgccccattggcaccagatacctgactcgtaatctg

SEQ ID NO: 162 - DNA, 2229 bp, Adeno-Associated Virus 9
  source 1..2229: mol_type = other DNA
atggctgccgatggttatcttccagattggctcgaggacaaccttagtgaaggaattcgcgagtggtgggctttgaaacctggagcccctcaacccaaggcaaatcaacaacatcaagacaacgctcgaggtcttgtgcttccgggttacaaataccttggacccggcaacggactcgacaagggggagccggtcaacgcagcagacgcggcggccctcgagcacgacaaggcctacgaccagcagctcaaggccggagacaacccgtacctcaagtacaaccacgccgacgccgagttccaggagcggctcaaagaagatacgtcttttgggggcaacctcgggcgagcagtcttccaggccaaaaagaggcttcttgaacctcttggtctggttgaggaagcggctaagacggctcctggaaagaagaggcctgtagagcagtctcctcaggaaccggactcctccgcgggtattggcaaatcgggtgcacagcccgctaaaaagagactcaatttcggtcagactggcgacacagagtcagtcccagaccctcaaccaatcggagaacctcccgcagccccctcaggtgtgggatctcttacaatggcttcaggtggtggcgcaccagtggcagacaataacgaaggtgccgatggagtgggtagttcctcgggaaattggcattgcgattcccaatggctgggggacagagtcatcaccaccagcacccgaacctgggccctgcccacctacaacaatcacctctacaagcaaatctccaacagcacatctggaggatcttcaaatgacaacgcctacttcggctacagcaccccctgggggtattttgacttcaacagattccactgccacttctcaccacgtgactggcagcgactcatcaacaacaactggggattccggcctaagcgactcaacttcaagctcttcaacattcaggtcaaagaggttacggacaacaatggagtcaagaccatcgccaataaccttaccagcacggtccaggtcttcacggactcagactatcagctcccgtacgtgctcgggtcggctcacgagggctgcctcccgccgttcccagcggacgttttcatgattcctcagtacgggtatctgacgcttaatgatggaagccaggccgtgggtcgttcgtccttttactgcctggaatatttcccgtcgcaaatgctaagaacgggtaacaacttccagttcagctacgagtttgagaacgtacctttccatagcagctacgctcacagccaaagcctggaccgactaatgaatccactcatcgaccaatacttgtactatctctctagaactattaacggttctggacagaatcaacaaacgctaaaattcagtgtggccggacccagcaacatggctgtccagggaagaaactacatacctggacccagctaccgacaacaacgtgtctcaaccactgtgactcaaaacaacaacagcgaatttgcttggcctggagcttcttcttgggctctcaatggacgtaatagcttgatgaatcctggacctgctatggccagccacaaagaaggagaggaccgtttctttcctttgtctggatctttaatttttggcaaacaaggtaccggcagagacaacgtggatgcggacaaagtcatgataaccaacgaagaagaaattaaaactactaacccggtagcaacggagtcctatggacaagtggccacaaaccaccagagtgcacaaacagcgcgtcctaacgagtacgcgcaagcgcagaccggttgggttcaaaaccaaggaatacttccgggtatggtttggcaggacagagatgtgtacctgcaaggacccatttgggccaaaattcctcacacggacggcaactttcacccttctccgctgatgggagggtttggaatgaagcacccgcctcctcagatcctcatcaaaaacacacctgtacctgcggatcctccaacggccttcaacaaggacaagctgaactctttcatcacccagtattctactggccaagtcagcgtggagatcgagtgggagctgcagaaggaaaacagcaagcgctggaacccggagatccagtacacttccaactattacaagtctaataatgttgaatttgctgttaatactgaaggtgtatatagtgaaccccgccccattggcaccagatacctgactcgtaatctg

SEQ ID NO: 163 - DNA, 2229 bp, Adeno-Associated Virus 9
  source 1..2229: mol_type = other DNA
atggctgccgatggttatcttccagattggctcgaggacaaccttagtgaaggaattcgcgagtggtgggctttgaaacctggagcccctcaacccaaggcaaatcaacaacatcaagacaacgctcgaggtcttgtgcttccgggttacaaataccttggacccggcaacggactcgacaagggggagccggtcaacgcagcagacgcggcggccctcgagcacgacaaggcctacgaccagcagctcaaggccggagacaacccgtacctcaagtacaaccacgccgacgccgagttccaggagcggctcaaagaagatacgtcttttgggggcaacctcgggcgagcagtcttccaggccaaaaagaggcttcttgaacctcttggtctggttgaggaagcggctaagacggctcctggaaagaagaggcctgtagagcagtctcctcaggaaccggactcctccgcgggtattggcaaatcgggtgcacagcccgctaaaaagagactcaatttcggtcagactggcgacacagagtcagtcccagaccctcaaccaatcggagaacctcccgcagccccctcaggtgtgggatctcttacaatggcttcaggtggtggcgcaccagtggcagacaataacgaaggtgccgatggagtgggtagttcctcgggaaattggcattgcgattcccaatggctgggggacagagtcatcaccaccagcacccgaacctgggccctgcccacctacaacaatcacctctacaagcaaatctccaacagcacatctggaggatcttcaaatgacaacgcctacttcggctacagcaccccctgggggtattttgacttcaacagattccactgccacttctcaccacgtgactggcagcgactcatcaacaacaactggggattccggcctaagcgactcaacttcaagctcttcaacattcaggtcaaagaggttacggacaacaatggagtcaagaccatcgccaataaccttaccagcacggtccaggtcttcacggactcagactatcagctcccgtacgtgctcgggtcggctcacgagggctgcctcccgccgttcccagcggacgttttcatgattcctcagtacgggtatctgacgcttaatgatggaagccaggccgtgggtcgttcgtccttttactgcctggaatatttcccgtcgcaaatgctaagaacgggtaacaacttccagttcagctacgagtttgagaacgtacctttccatagcagctacgctcacagccaaagcctggaccgactaatgaatccactcatcgaccaatacttgtactatctctctagaactattaacggttctggacagaatcaacaaacgctaaaattcagtgtggccggacccagcaacatggctgtccagggaagaaactacatacctggacccagctaccgacaacaacgtgtctcaaccactgtgactcaaaacaacaacagcgaatttgcttggcctggagcttcttcttgggctctcaatggacgtaatagcttgatgaatcctggacctgctatggccagccacaaagaaggagaggaccgtttctttcctttgtctggatctttaatttttggcaaacaaggtaccggcagagacaacgtggatgcggacaaagtcatgataaccaacgaagaagaaattaaaactactaacccggtagcaacggagtcctatggacaagtggccacaaaccaccagagtgctcaaactgcccgtcctaatgaatacgcccaagcacaaaccggttgggttcaaaaccaaggaatacttccgggtatggtttggcaggacagagatgtgtacctgcaaggacccatttgggccaaaattcctcacacggacggcaactttcacccttctccgctgatgggagggtttggaatgaagcacccgcctcctcagatcctcatcaaaaacacacctgtacctgcggatcctccaacggccttcaacaaggacaagctgaactctttcatcacccagtattctactggccaagtcagcgtggagatcgagtgggagctgcagaaggaaaacagcaagcgctggaacccggagatccagtacacttccaactattacaagtctaataatgttgaatttgctgttaatactgaaggtgtatatagtgaaccccgccccattggcaccagatacctgactcgtaatctg

SEQ ID NO: 164 - DNA, 2229 bp, Adeno-Associated Virus 9
  source 1..2229: mol_type = other DNA
atggctgccgatggttatcttccagattggctcgaggacaaccttagtgaaggaattcgcgagtggtgggctttgaaacctggagcccctcaacccaaggcaaatcaacaacatcaagacaacgctcgaggtcttgtgcttccgggttacaaataccttggacccggcaacggactcgacaagggggagccggtcaacgcagcagacgcggcggccctcgagcacgacaaggcctacgaccagcagctcaaggccggagacaacccgtacctcaagtacaaccacgccgacgccgagttccaggagcggctcaaagaagatacgtcttttgggggcaacctcgggcgagcagtcttccaggccaaaaagaggcttcttgaacctcttggtctggttgaggaagcggctaagacggctcctggaaagaagaggcctgtagagcagtctcctcaggaaccggactcctccgcgggtattggcaaatcgggtgcacagcccgctaaaaagagactcaatttcggtcagactggcgacacagagtcagtcccagaccctcaaccaatcggagaacctcccgcagccccctcaggtgtgggatctcttacaatggcttcaggtggtggcgcaccagtggcagacaataacgaaggtgccgatggagtgggtagttcctcgggaaattggcattgcgattcccaatggctgggggacagagtcatcaccaccagcacccgaacctgggccctgcccacctacaacaatcacctctacaagcaaatctccaacagcacatctggaggatcttcaaatgacaacgcctacttcggctacagcaccccctgggggtattttgacttcaacagattccactgccacttctcaccacgtgactggcagcgactcatcaacaacaactggggattccggcctaagcgactcaacttcaagctcttcaacattcaggtcaaagaggttacggacaacaatggagtcaagaccatcgccaataaccttaccagcacggtccaggtcttcacggactcagactatcagctcccgtacgtgctcgggtcggctcacgagggctgcctcccgccgttcccagcggacgttttcatgattcctcagtacgggtatctgacgcttaatgatggaagccaggccgtgggtcgttcgtccttttactgcctggaatatttcccgtcgcaaatgctaagaacgggtaacaacttccagttcagctacgagtttgagaacgtacctttccatagcagctacgctcacagccaaagcctggaccgactaatgaatccactcatcgaccaatacttgtactatctctctagaactattaacggttctggacagaatcaacaaacgctaaaattcagtgtggccggacccagcaacatggctgtccagggaagaaactacatacctggacccagctaccgacaacaacgtgtctcaaccactgtgactcaaaacaacaacagcgaatttgcttggcctggagcttcttcttgggctctcaatggacgtaatagcttgatgaatcctggacctgctatggccagccacaaagaaggagaggaccgtttctttcctttgtctggatctttaatttttggcaaacaaggtaccggcagagacaacgtggatgcggacaaagtcatgataaccaacgaagaagaaattaaaactactaacccggtagcaacggagtcctatggacaagtggccacaaaccaccagagtgcacagacagcgagaccaaacgagtatgcgcaggctcagaccggttgggttcaaaaccaaggaatacttccgggtatggtttggcaggacagagatgtgtacctgcaaggacccatttgggccaaaattcctcacacggacggcaactttcacccttctccgctgatgggagggtttggaatgaagcacccgcctcctcagatcctcatcaaaaacacacctgtacctgcggatcctccaacggccttcaacaaggacaagctgaactctttcatcacccagtattctactggccaagtcagcgtggagatcgagtgggagctgcagaaggaaaacagcaagcgctggaacccggagatccagtacacttccaactattacaagtctaataatgttgaatttgctgttaatactgaaggtgtatatagtgaaccccgccccattggcaccagatacctgactcgtaatctg

SEQ ID NO: 165 - DNA, 2229 bp, Adeno-Associated Virus 9
  source 1..2229: mol_type = other DNA
atggctgccgatggttatcttccagattggctcgaggacaaccttagtgaaggaattcgcgagtggtgggctttgaaacctggagcccctcaacccaaggcaaatcaacaacatcaagacaacgctcgaggtcttgtgcttccgggttacaaataccttggacccggcaacggactcgacaagggggagccggtcaacgcagcagacgcggcggccctcgagcacgacaaggcctacgaccagcagctcaaggccggagacaacccgtacctcaagtacaaccacgccgacgccgagttccaggagcggctcaaagaagatacgtcttttgggggcaacctcgggcgagcagtcttccaggccaaaaagaggcttcttgaacctcttggtctggttgaggaagcggctaagacggctcctggaaagaagaggcctgtagagcagtctcctcaggaaccggactcctccgcgggtattggcaaatcgggtgcacagcccgctaaaaagagactcaatttcggtcagactggcgacacagagtcagtcccagaccctcaaccaatcggagaacctcccgcagccccctcaggtgtgggatctcttacaatggcttcaggtggtggcgcaccagtggcagacaataacgaaggtgccgatggagtgggtagttcctcgggaaattggcattgcgattcccaatggctgggggacagagtcatcaccaccagcacccgaacctgggccctgcccacctacaacaatcacctctacaagcaaatctccaacagcacatctggaggatcttcaaatgacaacgcctacttcggctacagcaccccctgggggtattttgacttcaacagattccactgccacttctcaccacgtgactggcagcgactcatcaacaacaactggggattccggcctaagcgactcaacttcaagctcttcaacattcaggtcaaagaggttacggacaacaatggagtcaagaccatcgccaataaccttaccagcacggtccaggtcttcacggactcagactatcagctcccgtacgtgctcgggtcggctcacgagggctgcctcccgccgttcccagcggacgttttcatgattcctcagtacgggtatctgacgcttaatgatggaagccaggccgtgggtcgttcgtccttttactgcctggaatatttcccgtcgcaaatgctaagaacgggtaacaacttccagttcagctacgagtttgagaacgtacctttccatagcagctacgctcacagccaaagcctggaccgactaatgaatccactcatcgaccaatacttgtactatctctctagaactattaacggttctggacagaatcaacaaacgctaaaattcagtgtggccggacccagcaacatggctgtccagggaagaaactacatacctggacccagctaccgacaacaacgtgtctcaaccactgtgactcaaaacaacaacagcgaatttgcttggcctggagcttcttcttgggctctcaatggacgtaatagcttgatgaatcctggacctgctatggccagccacaaagaaggagaggaccgtttctttcctttgtctggatctttaatttttggcaaacaaggtaccggcagagacaacgtggatgcggacaaagtcatgataaccaacgaagaagaaattaaaactactaacccggtagcaacggagtcctatggacaagtggccacaaaccaccagagtgcgcagacggcccgacctaacgagtacgcccaggcacaaaccggttgggttcaaaaccaaggaatacttccgggtatggtttggcaggacagagatgtgtacctgcaaggacccatttgggccaaaattcctcacacggacggcaactttcacccttctccgctgatgggagggtttggaatgaagcacccgcctcctcagatcctcatcaaaaacacacctgtacctgcggatcctccaacggccttcaacaaggacaagctgaactctttcatcacccagtattctactggccaagtcagcgtggagatcgagtgggagctgcagaaggaaaacagcaagcgctggaacccggagatccagtacacttccaactattacaagtctaataatgttgaatttgctgttaatactgaaggtgtatatagtgaaccccgccccattggcaccagatacctgactcgtaatctg

SEQ ID NO: 166 - DNA, 2229 bp, Adeno-Associated Virus 9
  source 1..2229: mol_type = other DNA
atggctgccgatggttatcttccagattggctcgaggacaaccttagtgaaggaattcgcgagtggtgggctttgaaacctggagcccctcaacccaaggcaaatcaacaacatcaagacaacgctcgaggtcttgtgcttccgggttacaaataccttggacccggcaacggactcgacaagggggagccggtcaacgcagcagacgcggcggccctcgagcacgacaaggcctacgaccagcagctcaaggccggagacaacccgtacctcaagtacaaccacgccgacgccgagttccaggagcggctcaaagaagatacgtcttttgggggcaacctcgggcgagcagtcttccaggccaaaaagaggcttcttgaacctcttggtctggttgaggaagcggctaagacggctcctggaaagaagaggcctgtagagcagtctcctcaggaaccggactcctccgcgggtattggcaaatcgggtgcacagcccgctaaaaagagactcaatttcggtcagactggcgacacagagtcagtcccagaccctcaaccaatcggagaacctcccgcagccccctcaggtgtgggatctcttacaatggcttcaggtggtggcgcaccagtggcagacaataacgaaggtgccgatggagtgggtagttcctcgggaaattggcattgcgattcccaatggctgggggacagagtcatcaccaccagcacccgaacctgggccctgcccacctacaacaatcacctctacaagcaaatctccaacagcacatctggaggatcttcaaatgacaacgcctacttcggctacagcaccccctgggggtattttgacttcaacagattccactgccacttctcaccacgtgactggcagcgactcatcaacaacaactggggattccggcctaagcgactcaacttcaagctcttcaacattcaggtcaaagaggttacggacaacaatggagtcaagaccatcgccaataaccttaccagcacggtccaggtcttcacggactcagactatcagctcccgtacgtgctcgggtcggctcacgagggctgcctcccgccgttcccagcggacgttttcatgattcctcagtacgggtatctgacgcttaatgatggaagccaggccgtgggtcgttcgtccttttactgcctggaatatttcccgtcgcaaatgctaagaacgggtaacaacttccagttcagctacgagtttgagaacgtacctttccatagcagctacgctcacagccaaagcctggaccgactaatgaatccactcatcgaccaatacttgtactatctctctagaactattaacggttctggacagaatcaacaaacgctaaaattcagtgtggccggacccagcaacatggctgtccagggaagaaactacatacctggacccagctaccgacaacaacgtgtctcaaccactgtgactcaaaacaacaacagcgaatttgcttggcctggagcttcttcttgggctctcaatggacgtaatagcttgatgaatcctggacctgctatggccagccacaaagaaggagaggaccgtttctttcctttgtctggatctttaatttttggcaaacaaggtaccggcagagacaacgtggatgcggacaaagtcatgataaccaacgaagaagaaattaaaactactaacccggtagcaacggagtcctatggacaagtggccacaaaccaccagagtgcgcaaactgctagacctaatgagtacgcacaagcgcagaccggttgggttcaaaaccaaggaatacttccgggtatggtttggcaggacagagatgtgtacctgcaaggacccatttgggccaaaattcctcacacggacggcaactttcacccttctccgctgatgggagggtttggaatgaagcacccgcctcctcagatcctcatcaaaaacacacctgtacctgcggatcctccaacggccttcaacaaggacaagctgaactctttcatcacccagtattctactggccaagtcagcgtggagatcgagtgggagctgcagaaggaaaacagcaagcgctggaacccggagatccagtacacttccaactattacaagtctaataatgttgaatttgctgttaatactgaaggtgtatatagtgaaccccgccccattggcaccagatacctgactcgtaatctg

SEQ ID NO: 167 - DNA, 2229 bp, Adeno-Associated Virus 9
  source 1..2229: mol_type = other DNA
atggctgccgatggttatcttccagattggctcgaggacaaccttagtgaaggaattcgcgagtggtgggctttgaaacctggagcccctcaacccaaggcaaatcaacaacatcaagacaacgctcgaggtcttgtgcttccgggttacaaataccttggacccggcaacggactcgacaagggggagccggtcaacgcagcagacgcggcggccctcgagcacgacaaggcctacgaccagcagctcaaggccggagacaacccgtacctcaagtacaaccacgccgacgccgagttccaggagcggctcaaagaagatacgtcttttgggggcaacctcgggcgagcagtcttccaggccaaaaagaggcttcttgaacctcttggtctggttgaggaagcggctaagacggctcctggaaagaagaggcctgtagagcagtctcctcaggaaccggactcctccgcgggtattggcaaatcgggtgcacagcccgctaaaaagagactcaatttcggtcagactggcgacacagagtcagtcccagaccctcaaccaatcggagaacctcccgcagccccctcaggtgtgggatctcttacaatggcttcaggtggtggcgcaccagtggcagacaataacgaaggtgccgatggagtgggtagttcctcgggaaattggcattgcgattcccaatggctgggggacagagtcatcaccaccagcacccgaacctgggccctgcccacctacaacaatcacctctacaagcaaatctccaacagcacatctggaggatcttcaaatgacaacgcctacttcggctacagcaccccctgggggtattttgacttcaacagattccactgccacttctcaccacgtgactggcagcgactcatcaacaacaactggggattccggcctaagcgactcaacttcaagctcttcaacattcaggtcaaagaggttacggacaacaatggagtcaagaccatcgccaataaccttaccagcacggtccaggtcttcacggactcagactatcagctcccgtacgtgctcgggtcggctcacgagggctgcctcccgccgttcccagcggacgttttcatgattcctcagtacgggtatctgacgcttaatgatggaagccaggccgtgggtcgttcgtccttttactgcctggaatatttcccgtcgcaaatgctaagaacgggtaacaacttccagttcagctacgagtttgagaacgtacctttccatagcagctacgctcacagccaaagcctggaccgactaatgaatccactcatcgaccaatacttgtactatctctctagaactattaacggttctggacagaatcaacaaacgctaaaattcagtgtggccggacccagcaacatggctgtccagggaagaaactacatacctggacccagctaccgacaacaacgtgtctcaaccactgtgactcaaaacaacaacagcgaatttgcttggcctggagcttcttcttgggctctcaatggacgtaatagcttgatgaatcctggacctgctatggccagccacaaagaaggagaggaccgtttctttcctttgtctggatctttaatttttggcaaacaaggtaccggcagagacaacgtggatgcggacaaagtcatgataaccaacgaagaagaaattaaaactactaacccggtagcaacggagtcctatggacaagtggccacaaaccaccagagtgcacaaaccgcacgtccgaatgaatatgctcaagcgcagaccggttgggttcaaaaccaaggaatacttccgggtatggtttggcaggacagagatgtgtacctgcaaggacccatttgggccaaaattcctcacacggacggcaactttcacccttctccgctgatgggagggtttggaatgaagcacccgcctcctcagatcctcatcaaaaacacacctgtacctgcggatcctccaacggccttcaacaaggacaagctgaactctttcatcacccagtattctactggccaagtcagcgtggagatcgagtgggagctgcagaaggaaaacagcaagcgctggaacccggagatccagtacacttccaactattacaagtctaataatgttgaatttgctgttaatactgaaggtgtatatagtgaaccccgccccattggcaccagatacctgactcgtaatctg

SEQ ID NO: 168 - DNA, 2229 bp, Adeno-Associated Virus 9
  source 1..2229: mol_type = other DNA
atggctgccgatggttatcttccagattggctcgaggacaaccttagtgaaggaattcgcgagtggtgggctttgaaacctggagcccctcaacccaaggcaaatcaacaacatcaagacaacgctcgaggtcttgtgcttccgggttacaaataccttggacccggcaacggactcgacaagggggagccggtcaacgcagcagacgcggcggccctcgagcacgacaaggcctacgaccagcagctcaaggccggagacaacccgtacctcaagtacaaccacgccgacgccgagttccaggagcggctcaaagaagatacgtcttttgggggcaacctcgggcgagcagtcttccaggccaaaaagaggcttcttgaacctcttggtctggttgaggaagcggctaagacggctcctggaaagaagaggcctgtagagcagtctcctcaggaaccggactcctccgcgggtattggcaaatcgggtgcacagcccgctaaaaagagactcaatttcggtcagactggcgacacagagtcagtcccagaccctcaaccaatcggagaacctcccgcagccccctcaggtgtgggatctcttacaatggcttcaggtggtggcgcaccagtggcagacaataacgaaggtgccgatggagtgggtagttcctcgggaaattggcattgcgattcccaatggctgggggacagagtcatcaccaccagcacccgaacctgggccctgcccacctacaacaatcacctctacaagcaaatctccaacagcacatctggaggatcttcaaatgacaacgcctacttcggctacagcaccccctgggggtattttgacttcaacagattccactgccacttctcaccacgtgactggcagcgactcatcaacaacaactggggattccggcctaagcgactcaacttcaagctcttcaacattcaggtcaaagaggttacggacaacaatggagtcaagaccatcgccaataaccttaccagcacggtccaggtcttcacggactcagactatcagctcccgtacgtgctcgggtcggctcacgagggctgcctcccgccgttcccagcggacgttttcatgattcctcagtacgggtatctgacgcttaatgatggaagccaggccgtgggtcgttcgtccttttactgcctggaatatttcccgtcgcaaatgctaagaacgggtaacaacttccagttcagctacgagtttgagaacgtacctttccatagcagctacgctcacagccaaagcctggaccgactaatgaatccactcatcgaccaatacttgtactatctctctagaactattaacggttctggacagaatcaacaaacgctaaaattcagtgtggccggacccagcaacatggctgtccagggaagaaactacatacctggacccagctaccgacaacaacgtgtctcaaccactgtgactcaaaacaacaacagcgaatttgcttggcctggagcttcttcttgggctctcaatggacgtaatagcttgatgaatcctggacctgctatggccagccacaaagaaggagaggaccgtttctttcctttgtctggatctttaatttttggcaaacaaggtaccggcagagacaacgtggatgcggacaaagtcatgataaccaacgaagaagaaattaaaactactaacccggtagcaacggagtcctatggacaagtggccacaaaccaccagagtgcccagaccgcacgaccgaacgaatatgcgcaggcacaaaccggttgggttcaaaaccaaggaatacttccgggtatggtttggcaggacagagatgtgtacctgcaaggacccatttgggccaaaattcctcacacggacggcaactttcacccttctccgctgatgggagggtttggaatgaagcacccgcctcctcagatcctcatcaaaaacacacctgtacctgcggatcctccaacggccttcaacaaggacaagctgaactctttcatcacccagtattctactggccaagtcagcgtggagatcgagtgggagctgcagaaggaaaacagcaagcgctggaacccggagatccagtacacttccaactattacaagtctaataatgttgaatttgctgttaatactgaaggtgtatatagtgaaccccgccccattggcaccagatacctgactcgtaatctg

SEQ ID NO: 169 - DNA, 2229 bp, Adeno-Associated Virus 9
  source 1..2229: mol_type = other DNA
atggctgccgatggttatcttccagattggctcgaggacaaccttagtgaaggaattcgcgagtggtgggctttgaaacctggagcccctcaacccaaggcaaatcaacaacatcaagacaacgctcgaggtcttgtgcttccgggttacaaataccttggacccggcaacggactcgacaagggggagccggtcaacgcagcagacgcggcggccctcgagcacgacaaggcctacgaccagcagctcaaggccggagacaacccgtacctcaagtacaaccacgccgacgccgagttccaggagcggctcaaagaagatacgtcttttgggggcaacctcgggcgagcagtcttccaggccaaaaagaggcttcttgaacctcttggtctggttgaggaagcggctaagacggctcctggaaagaagaggcctgtagagcagtctcctcaggaaccggactcctccgcgggtattggcaaatcgggtgcacagcccgctaaaaagagactcaatttcggtcagactggcgacacagagtcagtcccagaccctcaaccaatcggagaacctcccgcagccccctcaggtgtgggatctcttacaatggcttcaggtggtggcgcaccagtggcagacaataacgaaggtgccgatggagtgggtagttcctcgggaaattggcattgcgattcccaatggctgggggacagagtcatcaccaccagcacccgaacctgggccctgcccacctacaacaatcacctctacaagcaaatctccaacagcacatctggaggatcttcaaatgacaacgcctacttcggctacagcaccccctgggggtattttgacttcaacagattccactgccacttctcaccacgtgactggcagcgactcatcaacaacaactggggattccggcctaagcgactcaacttcaagctcttcaacattcaggtcaaagaggttacggacaacaatggagtcaagaccatcgccaataaccttaccagcacggtccaggtcttcacggactcagactatcagctcccgtacgtgctcgggtcggctcacgagggctgcctcccgccgttcccagcggacgttttcatgattcctcagtacgggtatctgacgcttaatgatggaagccaggccgtgggtcgttcgtccttttactgcctggaatatttcccgtcgcaaatgctaagaacgggtaacaacttccagttcagctacgagtttgagaacgtacctttccatagcagctacgctcacagccaaagcctggaccgactaatgaatccactcatcgaccaatacttgtactatctctctagaactattaacggttctggacagaatcaacaaacgctaaaattcagtgtggccggacccagcaacatggctgtccagggaagaaactacatacctggacccagctaccgacaacaacgtgtctcaaccactgtgactcaaaacaacaacagcgaatttgcttggcctggagcttcttcttgggctctcaatggacgtaatagcttgatgaatcctggacctgctatggccagccacaaagaaggagaggaccgtttctttcctttgtctggatctttaatttttggcaaacaaggtaccggcagagacaacgtggatgcggacaaagtcatgataaccaacgaagaagaaattaaaactactaacccggtagcaacggagtcctatggacaagtggccacaaaccaccagagtgcgcagactgcaaggcccaatgaatatgcccaggcgcagaccggttgggttcaaaaccaaggaatacttccgggtatggtttggcaggacagagatgtgtacctgcaaggacccatttgggccaaaattcctcacacggacggcaactttcacccttctccgctgatgggagggtttggaatgaagcacccgcctcctcagatcctcatcaaaaacacacctgtacctgcggatcctccaacggccttcaacaaggacaagctgaactctttcatcacccagtattctactggccaagtcagcgtggagatcgagtgggagctgcagaaggaaaacagcaagcgctggaacccggagatccagtacacttccaactattacaagtctaataatgttgaatttgctgttaatactgaaggtgtatatagtgaaccccgccccattggcaccagatacctgactcgtaatctg

SEQ ID NO: 170 - DNA, 2229 bp, Adeno-Associated Virus 9
  source 1..2229: mol_type = other DNA
atggctgccgatggttatcttccagattggctcgaggacaaccttagtgaaggaattcgcgagtggtgggctttgaaacctggagcccctcaacccaaggcaaatcaacaacatcaagacaacgctcgaggtcttgtgcttccgggttacaaataccttggacccggcaacggactcgacaagggggagccggtcaacgcagcagacgcggcggccctcgagcacgacaaggcctacgaccagcagctcaaggccggagacaacccgtacctcaagtacaaccacgccgacgccgagttccaggagcggctcaaagaagatacgtcttttgggggcaacctcgggcgagcagtcttccaggccaaaaagaggcttcttgaacctcttggtctggttgaggaagcggctaagacggctcctggaaagaagaggcctgtagagcagtctcctcaggaaccggactcctccgcgggtattggcaaatcgggtgcacagcccgctaaaaagagactcaatttcggtcagactggcgacacagagtcagtcccagaccctcaaccaatcggagaacctcccgcagccccctcaggtgtgggatctcttacaatggcttcaggtggtggcgcaccagtggcagacaataacgaaggtgccgatggagtgggtagttcctcgggaaattggcattgcgattcccaatggctgggggacagagtcatcaccaccagcacccgaacctgggccctgcccacctacaacaatcacctctacaagcaaatctccaacagcacatctggaggatcttcaaatgacaacgcctacttcggctacagcaccccctgggggtattttgacttcaacagattccactgccacttctcaccacgtgactggcagcgactcatcaacaacaactggggattccggcctaagcgactcaacttcaagctcttcaacattcaggtcaaagaggttacggacaacaatggagtcaagaccatcgccaataaccttaccagcacggtccaggtcttcacggactcagactatcagctcccgtacgtgctcgggtcggctcacgagggctgcctcccgccgttcccagcggacgttttcatgattcctcagtacgggtatctgacgcttaatgatggaagccaggccgtgggtcgttcgtccttttactgcctggaatatttcccgtcgcaaatgctaagaacgggtaacaacttccagttcagctacgagtttgagaacgtacctttccatagcagctacgctcacagccaaagcctggaccgactaatgaatccactcatcgaccaatacttgtactatctctctagaactattaacggttctggacagaatcaacaaacgctaaaattcagtgtggccggacccagcaacatggctgtccagggaagaaactacatacctggacccagctaccgacaacaacgtgtctcaaccactgtgactcaaaacaacaacagcgaatttgcttggcctggagcttcttcttgggctctcaatggacgtaatagcttgatgaatcctggacctgctatggccagccacaaagaaggagaggaccgtttctttcctttgtctggatctttaatttttggcaaacaaggtaccggcagagacaacgtggatgcggacaaagtcatgataaccaacgaagaagaaattaaaactactaacccggtagcaacggagtcctatggacaagtggccacaaaccaccagagtgcgcagaccgcccggcccaatgaatatgcccaggcacaaaccggttgggttcaaaaccaaggaatacttccgggtatggtttggcaggacagagatgtgtacctgcaaggacccatttgggccaaaattcctcacacggacggcaactttcacccttctccgctgatgggagggtttggaatgaagcacccgcctcctcagatcctcatcaaaaacacacctgtacctgcggatcctccaacggccttcaacaaggacaagctgaactctttcatcacccagtattctactggccaagtcagcgtggagatcgagtgggagctgcagaaggaaaacagcaagcgctggaacccggagatccagtacacttccaactattacaagtctaataatgttgaatttgctgttaatactgaaggtgtatatagtgaaccccgccccattggcaccagatacctgactcgtaatctg

SEQ ID NO: 171 - DNA, 2229 bp, Adeno-Associated Virus 9
  source 1..2229: mol_type = other DNA
atggctgccgatggttatcttccagattggctcgaggacaaccttagtgaaggaattcgcgagtggtgggctttgaaacctggagcccctcaacccaaggcaaatcaacaacatcaagacaacgctcgaggtcttgtgcttccgggttacaaataccttggacccggcaacggactcgacaagggggagccggtcaacgcagcagacgcggcggccctcgagcacgacaaggcctacgaccagcagctcaaggccggagacaacccgtacctcaagtacaaccacgccgacgccgagttccaggagcggctcaaagaagatacgtcttttgggggcaacctcgggcgagcagtcttccaggccaaaaagaggcttcttgaacctcttggtctggttgaggaagcggctaagacggctcctggaaagaagaggcctgtagagcagtctcctcaggaaccggactcctccgcgggtattggcaaatcgggtgcacagcccgctaaaaagagactcaatttcggtcagactggcgacacagagtcagtcccagaccctcaaccaatcggagaacctcccgcagccccctcaggtgtgggatctcttacaatggcttcaggtggtggcgcaccagtggcagacaataacgaaggtgccgatggagtgggtagttcctcgggaaattggcattgcgattcccaatggctgggggacagagtcatcaccaccagcacccgaacctgggccctgcccacctacaacaatcacctctacaagcaaatctccaacagcacatctggaggatcttcaaatgacaacgcctacttcggctacagcaccccctgggggtattttgacttcaacagattccactgccacttctcaccacgtgactggcagcgactcatcaacaacaactggggattccggcctaagcgactcaacttcaagctcttcaacattcaggtcaaagaggttacggacaacaatggagtcaagaccatcgccaataaccttaccagcacggtccaggtcttcacggactcagactatcagctcccgtacgtgctcgggtcggctcacgagggctgcctcccgccgttcccagcggacgttttcatgattcctcagtacgggtatctgacgcttaatgatggaagccaggccgtgggtcgttcgtccttttactgcctggaatatttcccgtcgcaaatgctaagaacgggtaacaacttccagttcagctacgagtttgagaacgtacctttccatagcagctacgctcacagccaaagcctggaccgactaatgaatccactcatcgaccaatacttgtactatctctctagaactattaacggttctggacagaatcaacaaacgctaaaattcagtgtggccggacccagcaacatggctgtccagggaagaaactacatacctggacccagctaccgacaacaacgtgtctcaaccactgtgactcaaaacaacaacagcgaatttgcttggcctggagcttcttcttgggctctcaatggacgtaatagcttgatgaatcctggacctgctatggccagccacaaagaaggagaggaccgtttctttcctttgtctggatctttaatttttggcaaacaaggtaccggcagagacaacgtggatgcggacaaagtcatgataaccaacgaagaagaaattaaaactactaacccggtagcaacggagtcctatggacaagtggccacaaaccaccagagtgctcagacgaggacaccagtggaattcgcgcaagcacaaaccggttgggttcaaaaccaaggaatacttccgggtatggtttggcaggacagagatgtgtacctgcaaggacccatttgggccaaaattcctcacacggacggcaactttcacccttctccgctgatgggagggtttggaatgaagcacccgcctcctcagatcctcatcaaaaacacacctgtacctgcggatcctccaacggccttcaacaaggacaagctgaactctttcatcacccagtattctactggccaagtcagcgtggagatcgagtgggagctgcagaaggaaaacagcaagcgctggaacccggagatccagtacacttccaactattacaagtctaataatgttgaatttgctgttaatactgaaggtgtatatagtgaaccccgccccattggcaccagatacctgactcgtaatctg

SEQ ID NO: 172 - DNA, 2229 bp, Adeno-Associated Virus 9
  source 1..2229: mol_type = other DNA
atggctgccgatggttatcttccagattggctcgaggacaaccttagtgaaggaattcgcgagtggtgggctttgaaacctggagcccctcaacccaaggcaaatcaacaacatcaagacaacgctcgaggtcttgtgcttccgggttacaaataccttggacccggcaacggactcgacaagggggagccggtcaacgcagcagacgcggcggccctcgagcacgacaaggcctacgaccagcagctcaaggccggagacaacccgtacctcaagtacaaccacgccgacgccgagttccaggagcggctcaaagaagatacgtcttttgggggcaacctcgggcgagcagtcttccaggccaaaaagaggcttcttgaacctcttggtctggttgaggaagcggctaagacggctcctggaaagaagaggcctgtagagcagtctcctcaggaaccggactcctccgcgggtattggcaaatcgggtgcacagcccgctaaaaagagactcaatttcggtcagactggcgacacagagtcagtcccagaccctcaaccaatcggagaacctcccgcagccccctcaggtgtgggatctcttacaatggcttcaggtggtggcgcaccagtggcagacaataacgaaggtgccgatggagtgggtagttcctcgggaaattggcattgcgattcccaatggctgggggacagagtcatcaccaccagcacccgaacctgggccctgcccacctacaacaatcacctctacaagcaaatctccaacagcacatctggaggatcttcaaatgacaacgcctacttcggctacagcaccccctgggggtattttgacttcaacagattccactgccacttctcaccacgtgactggcagcgactcatcaacaacaactggggattccggcctaagcgactcaacttcaagctcttcaacattcaggtcaaagaggttacggacaacaatggagtcaagaccatcgccaataaccttaccagcacggtccaggtcttcacggactcagactatcagctcccgtacgtgctcgggtcggctcacgagggctgcctcccgccgttcccagcggacgttttcatgattcctcagtacgggtatctgacgcttaatgatggaagccaggccgtgggtcgttcgtccttttactgcctggaatatttcccgtcgcaaatgctaagaacgggtaacaacttccagttcagctacgagtttgagaacgtacctttccatagcagctacgctcacagccaaagcctggaccgactaatgaatccactcatcgaccaatacttgtactatctctctagaactattaacggttctggacagaatcaacaaacgctaaaattcagtgtggccggacccagcaacatggctgtccagggaagaaactacatacctggacccagctaccgacaacaacgtgtctcaaccactgtgactcaaaacaacaacagcgaatttgcttggcctggagcttcttcttgggctctcaatggacgtaatagcttgatgaatcctggacctgctatggccagccacaaagaaggagaggaccgtttctttcctttgtctggatctttaatttttggcaaacaaggtaccggcagagacaacgtggatgcggacaaagtcatgataaccaacgaagaagaaattaaaactactaacccggtagcaacggagtcctatggacaagtggccacaaaccaccagagtgcacaaacacgtacccctgtcgaatttgcccaagcacaaaccggttgggttcaaaaccaaggaatacttccgggtatggtttggcaggacagagatgtgtacctgcaaggacccatttgggccaaaattcctcacacggacggcaactttcacccttctccgctgatgggagggtttggaatgaagcacccgcctcctcagatcctcatcaaaaacacacctgtacctgcggatcctccaacggccttcaacaaggacaagctgaactctttcatcacccagtattctactggccaagtcagcgtggagatcgagtgggagctgcagaaggaaaacagcaagcgctggaacccggagatccagtacacttccaactattacaagtctaataatgttgaatttgctgttaatactgaaggtgtatatagtgaaccccgccccattggcaccagatacctgactcgtaatctg

SEQ ID NO: 173 - DNA, 2229 bp, Adeno-Associated Virus 9
  source 1..2229: mol_type = other DNA
atggctgccgatggttatcttccagattggctcgaggacaaccttagtgaaggaattcgcgagtggtgggctttgaaacctggagcccctcaacccaaggcaaatcaacaacatcaagacaacgctcgaggtcttgtgcttccgggttacaaataccttggacccggcaacggactcgacaagggggagccggtcaacgcagcagacgcggcggccctcgagcacgacaaggcctacgaccagcagctcaaggccggagacaacccgtacctcaagtacaaccacgccgacgccgagttccaggagcggctcaaagaagatacgtcttttgggggcaacctcgggcgagcagtcttccaggccaaaaagaggcttcttgaacctcttggtctggttgaggaagcggctaagacggctcctggaaagaagaggcctgtagagcagtctcctcaggaaccggactcctccgcgggtattggcaaatcgggtgcacagcccgctaaaaagagactcaatttcggtcagactggcgacacagagtcagtcccagaccctcaaccaatcggagaacctcccgcagccccctcaggtgtgggatctcttacaatggcttcaggtggtggcgcaccagtggcagacaataacgaaggtgccgatggagtgggtagttcctcgggaaattggcattgcgattcccaatggctgggggacagagtcatcaccaccagcacccgaacctgggccctgcccacctacaacaatcacctctacaagcaaatctccaacagcacatctggaggatcttcaaatgacaacgcctacttcggctacagcaccccctgggggtattttgacttcaacagattccactgccacttctcaccacgtgactggcagcgactcatcaacaacaactggggattccggcctaagcgactcaacttcaagctcttcaacattcaggtcaaagaggttacggacaacaatggagtcaagaccatcgccaataaccttaccagcacggtccaggtcttcacggactcagactatcagctcccgtacgtgctcgggtcggctcacgagggctgcctcccgccgttcccagcggacgttttcatgattcctcagtacgggtatctgacgcttaatgatggaagccaggccgtgggtcgttcgtccttttactgcctggaatatttcccgtcgcaaatgctaagaacgggtaacaacttccagttcagctacgagtttgagaacgtacctttccatagcagctacgctcacagccaaagcctggaccgactaatgaatccactcatcgaccaatacttgtactatctctctagaactattaacggttctggacagaatcaacaaacgctaaaattcagtgtggccggacccagcaacatggctgtccagggaagaaactacatacctggacccagctaccgacaacaacgtgtctcaaccactgtgactcaaaacaacaacagcgaatttgcttggcctggagcttcttcttgggctctcaatggacgtaatagcttgatgaatcctggacctgctatggccagccacaaagaaggagaggaccgtttctttcctttgtctggatctttaatttttggcaaacaaggtaccggcagagacaacgtggatgcggacaaagtcatgataaccaacgaagaagaaattaaaactactaacccggtagcaacggagtcctatggacaagtggccacaaaccaccagagtgcccagacgaggacaccagtagagttcgctcaggcccagaccggttgggttcaaaaccaaggaatacttccgggtatggtttggcaggacagagatgtgtacctgcaaggacccatttgggccaaaattcctcacacggacggcaactttcacccttctccgctgatgggagggtttggaatgaagcacccgcctcctcagatcctcatcaaaaacacacctgtacctgcggatcctccaacggccttcaacaaggacaagctgaactctttcatcacccagtattctactggccaagtcagcgtggagatcgagtgggagctgcagaaggaaaacagcaagcgctggaacccggagatccagtacacttccaactattacaagtctaataatgttgaatttgctgttaatactgaaggtgtatatagtgaaccccgccccattggcaccagatacctgactcgtaatctg

SEQ ID NO: 174 - DNA, 2229 bp, Adeno-Associated Virus 9
  source 1..2229: mol_type = other DNA
atggctgccgatggttatcttccagattggctcgaggacaaccttagtgaaggaattcgcgagtggtgggctttgaaacctggagcccctcaacccaaggcaaatcaacaacatcaagacaacgctcgaggtcttgtgcttccgggttacaaataccttggacccggcaacggactcgacaagggggagccggtcaacgcagcagacgcggcggccctcgagcacgacaaggcctacgaccagcagctcaaggccggagacaacccgtacctcaagtacaaccacgccgacgccgagttccaggagcggctcaaagaagatacgtcttttgggggcaacctcgggcgagcagtcttccaggccaaaaagaggcttcttgaacctcttggtctggttgaggaagcggctaagacggctcctggaaagaagaggcctgtagagcagtctcctcaggaaccggactcctccgcgggtattggcaaatcgggtgcacagcccgctaaaaagagactcaatttcggtcagactggcgacacagagtcagtcccagaccctcaaccaatcggagaacctcccgcagccccctcaggtgtgggatctcttacaatggcttcaggtggtggcgcaccagtggcagacaataacgaaggtgccgatggagtgggtagttcctcgggaaattggcattgcgattcccaatggctgggggacagagtcatcaccaccagcacccgaacctgggccctgcccacctacaacaatcacctctacaagcaaatctccaacagcacatctggaggatcttcaaatgacaacgcctacttcggctacagcaccccctgggggtattttgacttcaacagattccactgccacttctcaccacgtgactggcagcgactcatcaacaacaactggggattccggcctaagcgactcaacttcaagctcttcaacattcaggtcaaagaggttacggacaacaatggagtcaagaccatcgccaataaccttaccagcacggtccaggtcttcacggactcagactatcagctcccgtacgtgctcgggtcggctcacgagggctgcctcccgccgttcccagcggacgttttcatgattcctcagtacgggtatctgacgcttaatgatggaagccaggccgtgggtcgttcgtccttttactgcctggaatatttcccgtcgcaaatgctaagaacgggtaacaacttccagttcagctacgagtttgagaacgtacctttccatagcagctacgctcacagccaaagcctggaccgactaatgaatccactcatcgaccaatacttgtactatctctctagaactattaacggttctggacagaatcaacaaacgctaaaattcagtgtggccggacccagcaacatggctgtccagggaagaaactacatacctggacccagctaccgacaacaacgtgtctcaaccactgtgactcaaaacaacaacagcgaatttgcttggcctggagcttcttcttgggctctcaatggacgtaatagcttgatgaatcctggacctgctatggccagccacaaagaaggagaggaccgtttctttcctttgtctggatctttaatttttggcaaacaaggtaccggcagagacaacgtggatgcggacaaagtcatgataaccaacgaagaagaaattaaaactactaacccggtagcaacggagtcctatggacaagtggccacaaaccaccagagtgctcaaacgcgcacgccggtagagtttgcacaagcacagaccggttgggttcaaaaccaaggaatacttccgggtatggtttggcaggacagagatgtgtacctgcaaggacccatttgggccaaaattcctcacacggacggcaactttcacccttctccgctgatgggagggtttggaatgaagcacccgcctcctcagatcctcatcaaaaacacacctgtacctgcggatcctccaacggccttcaacaaggacaagctgaactctttcatcacccagtattctactggccaagtcagcgtggagatcgagtgggagctgcagaaggaaaacagcaagcgctggaacccggagatccagtacacttccaactattacaagtctaataatgttgaatttgctgttaatactgaaggtgtatatagtgaaccccgccccattggcaccagatacctgactcgtaatctg

SEQ ID NO: 175 - DNA, 2229 bp, Adeno-Associated Virus 9
  source 1..2229: mol_type = other DNA
atggctgccgatggttatcttccagattggctcgaggacaaccttagtgaaggaattcgcgagtggtgggctttgaaacctggagcccctcaacccaaggcaaatcaacaacatcaagacaacgctcgaggtcttgtgcttccgggttacaaataccttggacccggcaacggactcgacaagggggagccggtcaacgcagcagacgcggcggccctcgagcacgacaaggcctacgaccagcagctcaaggccggagacaacccgtacctcaagtacaaccacgccgacgccgagttccaggagcggctcaaagaagatacgtcttttgggggcaacctcgggcgagcagtcttccaggccaaaaagaggcttcttgaacctcttggtctggttgaggaagcggctaagacggctcctggaaagaagaggcctgtagagcagtctcctcaggaaccggactcctccgcgggtattggcaaatcgggtgcacagcccgctaaaaagagactcaatttcggtcagactggcgacacagagtcagtcccagaccctcaaccaatcggagaacctcccgcagccccctcaggtgtgggatctcttacaatggcttcaggtggtggcgcaccagtggcagacaataacgaaggtgccgatggagtgggtagttcctcgggaaattggcattgcgattcccaatggctgggggacagagtcatcaccaccagcacccgaacctgggccctgcccacctacaacaatcacctctacaagcaaatctccaacagcacatctggaggatcttcaaatgacaacgcctacttcggctacagcaccccctgggggtattttgacttcaacagattccactgccacttctcaccacgtgactggcagcgactcatcaacaacaactggggattccggcctaagcgactcaacttcaagctcttcaacattcaggtcaaagaggttacggacaacaatggagtcaagaccatcgccaataaccttaccagcacggtccaggtcttcacggactcagactatcagctcccgtacgtgctcgggtcggctcacgagggctgcctcccgccgttcccagcggacgttttcatgattcctcagtacgggtatctgacgcttaatgatggaagccaggccgtgggtcgttcgtccttttactgcctggaatatttcccgtcgcaaatgctaagaacgggtaacaacttccagttcagctacgagtttgagaacgtacctttccatagcagctacgctcacagccaaagcctggaccgactaatgaatccactcatcgaccaatacttgtactatctctctagaactattaacggttctggacagaatcaacaaacgctaaaattcagtgtggccggacccagcaacatggctgtccagggaagaaactacatacctggacccagctaccgacaacaacgtgtctcaaccactgtgactcaaaacaacaacagcgaatttgcttggcctggagcttcttcttgggctctcaatggacgtaatagcttgatgaatcctggacctgctatggccagccacaaagaaggagaggaccgtttctttcctttgtctggatctttaatttttggcaaacaaggtaccggcagagacaacgtggatgcggacaaagtcatgataaccaacgaagaagaaattaaaactactaacccggtagcaacggagtcctatggacaagtggccacaaaccaccagagtgcgcaaactaggactcctgtagaatttgcccaagcccaaaccggttgggttcaaaaccaaggaatacttccgggtatggtttggcaggacagagatgtgtacctgcaaggacccatttgggccaaaattcctcacacggacggcaactttcacccttctccgctgatgggagggtttggaatgaagcacccgcctcctcagatcctcatcaaaaacacacctgtacctgcggatcctccaacggccttcaacaaggacaagctgaactctttcatcacccagtattctactggccaagtcagcgtggagatcgagtgggagctgcagaaggaaaacagcaagcgctggaacccggagatccagtacacttccaactattacaagtctaataatgttgaatttgctgttaatactgaaggtgtatatagtgaaccccgccccattggcaccagatacctgactcgtaatctg

SEQ ID NO: 176 - DNA, 2229 bp, Adeno-Associated Virus 9
  source 1..2229: mol_type = other DNA
atggctgccgatggttatcttccagattggctcgaggacaaccttagtgaaggaattcgcgagtggtgggctttgaaacctggagcccctcaacccaaggcaaatcaacaacatcaagacaacgctcgaggtcttgtgcttccgggttacaaataccttggacccggcaacggactcgacaagggggagccggtcaacgcagcagacgcggcggccctcgagcacgacaaggcctacgaccagcagctcaaggccggagacaacccgtacctcaagtacaaccacgccgacgccgagttccaggagcggctcaaagaagatacgtcttttgggggcaacctcgggcgagcagtcttccaggccaaaaagaggcttcttgaacctcttggtctggttgaggaagcggctaagacggctcctggaaagaagaggcctgtagagcagtctcctcaggaaccggactcctccgcgggtattggcaaatcgggtgcacagcccgctaaaaagagactcaatttcggtcagactggcgacacagagtcagtcccagaccctcaaccaatcggagaacctcccgcagccccctcaggtgtgggatctcttacaatggcttcaggtggtggcgcaccagtggcagacaataacgaaggtgccgatggagtgggtagttcctcgggaaattggcattgcgattcccaatggctgggggacagagtcatcaccaccagcacccgaacctgggccctgcccacctacaacaatcacctctacaagcaaatctccaacagcacatctggaggatcttcaaatgacaacgcctacttcggctacagcaccccctgggggtattttgacttcaacagattccactgccacttctcaccacgtgactggcagcgactcatcaacaacaactggggattccggcctaagcgactcaacttcaagctcttcaacattcaggtcaaagaggttacggacaacaatggagtcaagaccatcgccaataaccttaccagcacggtccaggtcttcacggactcagactatcagctcccgtacgtgctcgggtcggctcacgagggctgcctcccgccgttcccagcggacgttttcatgattcctcagtacgggtatctgacgcttaatgatggaagccaggccgtgggtcgttcgtccttttactgcctggaatatttcccgtcgcaaatgctaagaacgggtaacaacttccagttcagctacgagtttgagaacgtacctttccatagcagctacgctcacagccaaagcctggaccgactaatgaatccactcatcgaccaatacttgtactatctctctagaactattaacggttctggacagaatcaacaaacgctaaaattcagtgtggccggacccagcaacatggctgtccagggaagaaactacatacctggacccagctaccgacaacaacgtgtctcaaccactgtgactcaaaacaacaacagcgaatttgcttggcctggagcttcttcttgggctctcaatggacgtaatagcttgatgaatcctggacctgctatggccagccacaaagaaggagaggaccgtttctttcctttgtctggatctttaatttttggcaaacaaggtaccggcagagacaacgtggatgcggacaaagtcatgataaccaacgaagaagaaattaaaactactaacccggtagcaacggagtcctatggacaagtggccacaaaccaccagagtgcccagacccggactcctgttgaattcgcccaggcccaaaccggttgggttcaaaaccaaggaatacttccgggtatggtttggcaggacagagatgtgtacctgcaaggacccatttgggccaaaattcctcacacggacggcaactttcacccttctccgctgatgggagggtttggaatgaagcacccgcctcctcagatcctcatcaaaaacacacctgtacctgcggatcctccaacggccttcaacaaggacaagctgaactctttcatcacccagtattctactggccaagtcagcgtggagatcgagtgggagctgcagaaggaaaacagcaagcgctggaacccggagatccagtacacttccaactattacaagtctaataatgttgaatttgctgttaatactgaaggtgtatatagtgaaccccgccccattggcaccagatacctgactcgtaatctg

SEQ ID NO: 177 - DNA, 2229 bp, Adeno-Associated Virus 9
  source 1..2229: mol_type = other DNA
atggctgccgatggttatcttccagattggctcgaggacaaccttagtgaaggaattcgcgagtggtgggctttgaaacctggagcccctcaacccaaggcaaatcaacaacatcaagacaacgctcgaggtcttgtgcttccgggttacaaataccttggacccggcaacggactcgacaagggggagccggtcaacgcagcagacgcggcggccctcgagcacgacaaggcctacgaccagcagctcaaggccggagacaacccgtacctcaagtacaaccacgccgacgccgagttccaggagcggctcaaagaagatacgtcttttgggggcaacctcgggcgagcagtcttccaggccaaaaagaggcttcttgaacctcttggtctggttgaggaagcggctaagacggctcctggaaagaagaggcctgtagagcagtctcctcaggaaccggactcctccgcgggtattggcaaatcgggtgcacagcccgctaaaaagagactcaatttcggtcagactggcgacacagagtcagtcccagaccctcaaccaatcggagaacctcccgcagccccctcaggtgtgggatctcttacaatggcttcaggtggtggcgcaccagtggcagacaataacgaaggtgccgatggagtgggtagttcctcgggaaattggcattgcgattcccaatggctgggggacagagtcatcaccaccagcacccgaacctgggccctgcccacctacaacaatcacctctacaagcaaatctccaacagcacatctggaggatcttcaaatgacaacgcctacttcggctacagcaccccctgggggtattttgacttcaacagattccactgccacttctcaccacgtgactggcagcgactcatcaacaacaactggggattccggcctaagcgactcaacttcaagctcttcaacattcaggtcaaagaggttacggacaacaatggagtcaagaccatcgccaataaccttaccagcacggtccaggtcttcacggactcagactatcagctcccgtacgtgctcgggtcggctcacgagggctgcctcccgccgttcccagcggacgttttcatgattcctcagtacgggtatctgacgcttaatgatggaagccaggccgtgggtcgttcgtccttttactgcctggaatatttcccgtcgcaaatgctaagaacgggtaacaacttccagttcagctacgagtttgagaacgtacctttccatagcagctacgctcacagccaaagcctggaccgactaatgaatccactcatcgaccaatacttgtactatctctctagaactattaacggttctggacagaatcaacaaacgctaaaattcagtgtggccggacccagcaacatggctgtccagggaagaaactacatacctggacccagctaccgacaacaacgtgtctcaaccactgtgactcaaaacaacaacagcgaatttgcttggcctggagcttcttcttgggctctcaatggacgtaatagcttgatgaatcctggacctgctatggccagccacaaagaaggagaggaccgtttctttcctttgtctggatctttaatttttggcaaacaaggtaccggcagagacaacgtggatgcggacaaagtcatgataaccaacgaagaagaaattaaaactactaacccggtagcaacggagtcctatggacaagtggccacaaaccaccagagtgcccaaacaaggacgccggtcgaatttgcacaagctcaaaccggttgggttcaaaaccaaggaatacttccgggtatggtttggcaggacagagatgtgtacctgcaaggacccatttgggccaaaattcctcacacggacggcaactttcacccttctccgctgatgggagggtttggaatgaagcacccgcctcctcagatcctcatcaaaaacacacctgtacctgcggatcctccaacggccttcaacaaggacaagctgaactctttcatcacccagtattctactggccaagtcagcgtggagatcgagtgggagctgcagaaggaaaacagcaagcgctggaacccggagatccagtacacttccaactattacaagtctaataatgttgaatttgctgttaatactgaaggtgtatatagtgaaccccgccccattggcaccagatacctgactcgtaatctg

SEQ ID NO: 178 - DNA, 2229 bp, Adeno-Associated Virus 9
  source 1..2229: mol_type = other DNA
atggctgccgatggttatcttccagattggctcgaggacaaccttagtgaaggaattcgcgagtggtgggctttgaaacctggagcccctcaacccaaggcaaatcaacaacatcaagacaacgctcgaggtcttgtgcttccgggttacaaataccttggacccggcaacggactcgacaagggggagccggtcaacgcagcagacgcggcggccctcgagcacgacaaggcctacgaccagcagctcaaggccggagacaacccgtacctcaagtacaaccacgccgacgccgagttccaggagcggctcaaagaagatacgtcttttgggggcaacctcgggcgagcagtcttccaggccaaaaagaggcttcttgaacctcttggtctggttgaggaagcggctaagacggctcctggaaagaagaggcctgtagagcagtctcctcaggaaccggactcctccgcgggtattggcaaatcgggtgcacagcccgctaaaaagagactcaatttcggtcagactggcgacacagagtcagtcccagaccctcaaccaatcggagaacctcccgcagccccctcaggtgtgggatctcttacaatggcttcaggtggtggcgcaccagtggcagacaataacgaaggtgccgatggagtgggtagttcctcgggaaattggcattgcgattcccaatggctgggggacagagtcatcaccaccagcacccgaacctgggccctgcccacctacaacaatcacctctacaagcaaatctccaacagcacatctggaggatcttcaaatgacaacgcctacttcggctacagcaccccctgggggtattttgacttcaacagattccactgccacttctcaccacgtgactggcagcgactcatcaacaacaactggggattccggcctaagcgactcaacttcaagctcttcaacattcaggtcaaagaggttacggacaacaatggagtcaagaccatcgccaataaccttaccagcacggtccaggtcttcacggactcagactatcagctcccgtacgtgctcgggtcggctcacgagggctgcctcccgccgttcccagcggacgttttcatgattcctcagtacgggtatctgacgcttaatgatggaagccaggccgtgggtcgttcgtccttttactgcctggaatatttcccgtcgcaaatgctaagaacgggtaacaacttccagttcagctacgagtttgagaacgtacctttccatagcagctacgctcacagccaaagcctggaccgactaatgaatccactcatcgaccaatacttgtactatctctctagaactattaacggttctggacagaatcaacaaacgctaaaattcagtgtggccggacccagcaacatggctgtccagggaagaaactacatacctggacccagctaccgacaacaacgtgtctcaaccactgtgactcaaaacaacaacagcgaatttgcttggcctggagcttcttcttgggctctcaatggacgtaatagcttgatgaatcctggacctgctatggccagccacaaagaaggagaggaccgtttctttcctttgtctggatctttaatttttggcaaacaaggtaccggcagagacaacgtggatgcggacaaagtcatgataaccaacgaagaagaaattaaaactactaacccggtagcaacggagtcctatggacaagtggccacaaaccaccagagtgcacaaactcgtacgccggttgagtttgcccaggcgcagaccggttgggttcaaaaccaaggaatacttccgggtatggtttggcaggacagagatgtgtacctgcaaggacccatttgggccaaaattcctcacacggacggcaactttcacccttctccgctgatgggagggtttggaatgaagcacccgcctcctcagatcctcatcaaaaacacacctgtacctgcggatcctccaacggccttcaacaaggacaagctgaactctttcatcacccagtattctactggccaagtcagcgtggagatcgagtgggagctgcagaaggaaaacagcaagcgctggaacccggagatccagtacacttccaactattacaagtctaataatgttgaatttgctgttaatactgaaggtgtatatagtgaaccccgccccattggcaccagatacctgactcgtaatctg

SEQ ID NO: 179 - DNA, 2229 bp, Adeno-Associated Virus 9
  source 1..2229: mol_type = other DNA
atggctgccgatggttatcttccagattggctcgaggacaaccttagtgaaggaattcgcgagtggtgggctttgaaacctggagcccctcaacccaaggcaaatcaacaacatcaagacaacgctcgaggtcttgtgcttccgggttacaaataccttggacccggcaacggactcgacaagggggagccggtcaacgcagcagacgcggcggccctcgagcacgacaaggcctacgaccagcagctcaaggccggagacaacccgtacctcaagtacaaccacgccgacgccgagttccaggagcggctcaaagaagatacgtcttttgggggcaacctcgggcgagcagtcttccaggccaaaaagaggcttcttgaacctcttggtctggttgaggaagcggctaagacggctcctggaaagaagaggcctgtagagcagtctcctcaggaaccggactcctccgcgggtattggcaaatcgggtgcacagcccgctaaaaagagactcaatttcggtcagactggcgacacagagtcagtcccagaccctcaaccaatcggagaacctcccgcagccccctcaggtgtgggatctcttacaatggcttcaggtggtggcgcaccagtggcagacaataacgaaggtgccgatggagtgggtagttcctcgggaaattggcattgcgattcccaatggctgggggacagagtcatcaccaccagcacccgaacctgggccctgcccacctacaacaatcacctctacaagcaaatctccaacagcacatctggaggatcttcaaatgacaacgcctacttcggctacagcaccccctgggggtattttgacttcaacagattccactgccacttctcaccacgtgactggcagcgactcatcaacaacaactggggattccggcctaagcgactcaacttcaagctcttcaacattcaggtcaaagaggttacggacaacaatggagtcaagaccatcgccaataaccttaccagcacggtccaggtcttcacggactcagactatcagctcccgtacgtgctcgggtcggctcacgagggctgcctcccgccgttcccagcggacgttttcatgattcctcagtacgggtatctgacgcttaatgatggaagccaggccgtgggtcgttcgtccttttactgcctggaatatttcccgtcgcaaatgctaagaacgggtaacaacttccagttcagctacgagtttgagaacgtacctttccatagcagctacgctcacagccaaagcctggaccgactaatgaatccactcatcgaccaatacttgtactatctctctagaactattaacggttctggacagaatcaacaaacgctaaaattcagtgtggccggacccagcaacatggctgtccagggaagaaactacatacctggacccagctaccgacaacaacgtgtctcaaccactgtgactcaaaacaacaacagcgaatttgcttggcctggagcttcttcttgggctctcaatggacgtaatagcttgatgaatcctggacctgctatggccagccacaaagaaggagaggaccgtttctttcctttgtctggatctttaatttttggcaaacaaggtaccggcagagacaacgtggatgcggacaaagtcatgataaccaacgaagaagaaattaaaactactaacccggtagcaacggagtcctatggacaagtggccacaaaccaccagagtgctcagacgcgtacgccggtggagttcgctcaggcgcagaccggttgggttcaaaaccaaggaatacttccgggtatggtttggcaggacagagatgtgtacctgcaaggacccatttgggccaaaattcctcacacggacggcaactttcacccttctccgctgatgggagggtttggaatgaagcacccgcctcctcagatcctcatcaaaaacacacctgtacctgcggatcctccaacggccttcaacaaggacaagctgaactctttcatcacccagtattctactggccaagtcagcgtggagatcgagtgggagctgcagaaggaaaacagcaagcgctggaacccggagatccagtacacttccaactattacaagtctaataatgttgaatttgctgttaatactgaaggtgtatatagtgaaccccgccccattggcaccagatacctgactcgtaatctg

SEQ ID NO: 180 - DNA, 2229 bp, Adeno-Associated Virus 9
  source 1..2229: mol_type = other DNA
atggctgccgatggttatcttccagattggctcgaggacaaccttagtgaaggaattcgcgagtggtgggctttgaaacctggagcccctcaacccaaggcaaatcaacaacatcaagacaacgctcgaggtcttgtgcttccgggttacaaataccttggacccggcaacggactcgacaagggggagccggtcaacgcagcagacgcggcggccctcgagcacgacaaggcctacgaccagcagctcaaggccggagacaacccgtacctcaagtacaaccacgccgacgccgagttccaggagcggctcaaagaagatacgtcttttgggggcaacctcgggcgagcagtcttccaggccaaaaagaggcttcttgaacctcttggtctggttgaggaagcggctaagacggctcctggaaagaagaggcctgtagagcagtctcctcaggaaccggactcctccgcgggtattggcaaatcgggtgcacagcccgctaaaaagagactcaatttcggtcagactggcgacacagagtcagtcccagaccctcaaccaatcggagaacctcccgcagccccctcaggtgtgggatctcttacaatggcttcaggtggtggcgcaccagtggcagacaataacgaaggtgccgatggagtgggtagttcctcgggaaattggcattgcgattcccaatggctgggggacagagtcatcaccaccagcacccgaacctgggccctgcccacctacaacaatcacctctacaagcaaatctccaacagcacatctggaggatcttcaaatgacaacgcctacttcggctacagcaccccctgggggtattttgacttcaacagattccactgccacttctcaccacgtgactggcagcgactcatcaacaacaactggggattccggcctaagcgactcaacttcaagctcttcaacattcaggtcaaagaggttacggacaacaatggagtcaagaccatcgccaataaccttaccagcacggtccaggtcttcacggactcagactatcagctcccgtacgtgctcgggtcggctcacgagggctgcctcccgccgttcccagcggacgttttcatgattcctcagtacgggtatctgacgcttaatgatggaagccaggccgtgggtcgttcgtccttttactgcctggaatatttcccgtcgcaaatgctaagaacgggtaacaacttccagttcagctacgagtttgagaacgtacctttccatagcagctacgctcacagccaaagcctggaccgactaatgaatccactcatcgaccaatacttgtactatctctctagaactattaacggttctggacagaatcaacaaacgctaaaattcagtgtggccggacccagcaacatggctgtccagggaagaaactacatacctggacccagctaccgacaacaacgtgtctcaaccactgtgactcaaaacaacaacagcgaatttgcttggcctggagcttcttcttgggctctcaatggacgtaatagcttgatgaatcctggacctgctatggccagccacaaagaaggagaggaccgtttctttcctttgtctggatctttaatttttggcaaacaaggtaccggcagagacaacgtggatgcggacaaagtcatgataaccaacgaagaagaaattaaaactactaacccggtagcaacggagtcctatggacaagtggccacaaaccaccagagtgcgcagacgcgcaccccagttgagttcgcccaggcccagaccggttgggttcaaaaccaaggaatacttccgggtatggtttggcaggacagagatgtgtacctgcaaggacccatttgggccaaaattcctcacacggacggcaactttcacccttctccgctgatgggagggtttggaatgaagcacccgcctcctcagatcctcatcaaaaacacacctgtacctgcggatcctccaacggccttcaacaaggacaagctgaactctttcatcacccagtattctactggccaagtcagcgtggagatcgagtgggagctgcagaaggaaaacagcaagcgctggaacccggagatccagtacacttccaactattacaagtctaataatgttgaatttgctgttaatactgaaggtgtatatagtgaaccccgccccattggcaccagatacctgactcgtaatctg

SEQ ID NO: 181 - DNA, 2229 bp, Adeno-Associated Virus 9
  source 1..2229: mol_type = other DNA
atggctgccgatggttatcttccagattggctcgaggacaaccttagtgaaggaattcgcgagtggtgggctttgaaacctggagcccctcaacccaaggcaaatcaacaacatcaagacaacgctcgaggtcttgtgcttccgggttacaaataccttggacccggcaacggactcgacaagggggagccggtcaacgcagcagacgcggcggccctcgagcacgacaaggcctacgaccagcagctcaaggccggagacaacccgtacctcaagtacaaccacgccgacgccgagttccaggagcggctcaaagaagatacgtcttttgggggcaacctcgggcgagcagtcttccaggccaaaaagaggcttcttgaacctcttggtctggttgaggaagcggctaagacggctcctggaaagaagaggcctgtagagcagtctcctcaggaaccggactcctccgcgggtattggcaaatcgggtgcacagcccgctaaaaagagactcaatttcggtcagactggcgacacagagtcagtcccagaccctcaaccaatcggagaacctcccgcagccccctcaggtgtgggatctcttacaatggcttcaggtggtggcgcaccagtggcagacaataacgaaggtgccgatggagtgggtagttcctcgggaaattggcattgcgattcccaatggctgggggacagagtcatcaccaccagcacccgaacctgggccctgcccacctacaacaatcacctctacaagcaaatctccaacagcacatctggaggatcttcaaatgacaacgcctacttcggctacagcaccccctgggggtattttgacttcaacagattccactgccacttctcaccacgtgactggcagcgactcatcaacaacaactggggattccggcctaagcgactcaacttcaagctcttcaacattcaggtcaaagaggttacggacaacaatggagtcaagaccatcgccaataaccttaccagcacggtccaggtcttcacggactcagactatcagctcccgtacgtgctcgggtcggctcacgagggctgcctcccgccgttcccagcggacgttttcatgattcctcagtacgggtatctgacgcttaatgatggaagccaggccgtgggtcgttcgtccttttactgcctggaatatttcccgtcgcaaatgctaagaacgggtaacaacttccagttcagctacgagtttgagaacgtacctttccatagcagctacgctcacagccaaagcctggaccgactaatgaatccactcatcgaccaatacttgtactatctctctagaactattaacggttctggacagaatcaacaaacgctaaaattcagtgtggccggacccagcaacatggctgtccagggaagaaactacatacctggacccagctaccgacaacaacgtgtctcaaccactgtgactcaaaacaacaacagcgaatttgcttggcctggagcttcttcttgggctctcaatggacgtaatagcttgatgaatcctggacctgctatggccagccacaaagaaggagaggaccgtttctttcctttgtctggatctttaatttttggcaaacaaggtaccggcagagacaacgtggatgcggacaaagtcatgataaccaacgaagaagaaattaaaactactaacccggtagcaacggagtcctatggacaagtggccacaaaccaccagagtgcgcaggagaaccatactagggataaagcacaggcccagaccggttgggttcaaaaccaaggaatacttccgggtatggtttggcaggacagagatgtgtacctgcaaggacccatttgggccaaaattcctcacacggacggcaactttcacccttctccgctgatgggagggtttggaatgaagcacccgcctcctcagatcctcatcaaaaacacacctgtacctgcggatcctccaacggccttcaacaaggacaagctgaactctttcatcacccagtattctactggccaagtcagcgtggagatcgagtgggagctgcagaaggaaaacagcaagcgctggaacccggagatccagtacacttccaactattacaagtctaataatgttgaatttgctgttaatactgaaggtgtatatagtgaaccccgccccattggcaccagatacctgactcgtaatctg

SEQ ID NO: 182 - DNA, 2229 bp, Adeno-Associated Virus 9
  source 1..2229: mol_type = other DNA
atggctgccgatggttatcttccagattggctcgaggacaaccttagtgaaggaattcgcgagtggtgggctttgaaacctggagcccctcaacccaaggcaaatcaacaacatcaagacaacgctcgaggtcttgtgcttccgggttacaaataccttggacccggcaacggactcgacaagggggagccggtcaacgcagcagacgcggcggccctcgagcacgacaaggcctacgaccagcagctcaaggccggagacaacccgtacctcaagtacaaccacgccgacgccgagttccaggagcggctcaaagaagatacgtcttttgggggcaacctcgggcgagcagtcttccaggccaaaaagaggcttcttgaacctcttggtctggttgaggaagcggctaagacggctcctggaaagaagaggcctgtagagcagtctcctcaggaaccggactcctccgcgggtattggcaaatcgggtgcacagcccgctaaaaagagactcaatttcggtcagactggcgacacagagtcagtcccagaccctcaaccaatcggagaacctcccgcagccccctcaggtgtgggatctcttacaatggcttcaggtggtggcgcaccagtggcagacaataacgaaggtgccgatggagtgggtagttcctcgggaaattggcattgcgattcccaatggctgggggacagagtcatcaccaccagcacccgaacctgggccctgcccacctacaacaatcacctctacaagcaaatctccaacagcacatctggaggatcttcaaatgacaacgcctacttcggctacagcaccccctgggggtattttgacttcaacagattccactgccacttctcaccacgtgactggcagcgactcatcaacaacaactggggattccggcctaagcgactcaacttcaagctcttcaacattcaggtcaaagaggttacggacaacaatggagtcaagaccatcgccaataaccttaccagcacggtccaggtcttcacggactcagactatcagctcccgtacgtgctcgggtcggctcacgagggctgcctcccgccgttcccagcggacgttttcatgattcctcagtacgggtatctgacgcttaatgatggaagccaggccgtgggtcgttcgtccttttactgcctggaatatttcccgtcgcaaatgctaagaacgggtaacaacttccagttcagctacgagtttgagaacgtacctttccatagcagctacgctcacagccaaagcctggaccgactaatgaatccactcatcgaccaatacttgtactatctctctagaactattaacggttctggacagaatcaacaaacgctaaaattcagtgtggccggacccagcaacatggctgtccagggaagaaactacatacctggacccagctaccgacaacaacgtgtctcaaccactgtgactcaaaacaacaacagcgaatttgcttggcctggagcttcttcttgggctctcaatggacgtaatagcttgatgaatcctggacctgctatggccagccacaaagaaggagaggaccgtttctttcctttgtctggatctttaatttttggcaaacaaggtaccggcagagacaacgtggatgcggacaaagtcatgataaccaacgaagaagaaattaaaactactaacccggtagcaacggagtcctatggacaagtggccacaaaccaccagagtgcacaggagaatcatactcgtgataaagctcaagcccagaccggttgggttcaaaaccaaggaatacttccgggtatggtttggcaggacagagatgtgtacctgcaaggacccatttgggccaaaattcctcacacggacggcaactttcacccttctccgctgatgggagggtttggaatgaagcacccgcctcctcagatcctcatcaaaaacacacctgtacctgcggatcctccaacggccttcaacaaggacaagctgaactctttcatcacccagtattctactggccaagtcagcgtggagatcgagtgggagctgcagaaggaaaacagcaagcgctggaacccggagatccagtacacttccaactattacaagtctaataatgttgaatttgctgttaatactgaaggtgtatatagtgaaccccgccccattggcaccagatacctgactcgtaatctg

SEQ ID NO: 183 - DNA, 2229 bp, Adeno-Associated Virus 9
  source 1..2229: mol_type = other DNA
atggctgccgatggttatcttccagattggctcgaggacaaccttagtgaaggaattcgcgagtggtgggctttgaaacctggagcccctcaacccaaggcaaatcaacaacatcaagacaacgctcgaggtcttgtgcttccgggttacaaataccttggacccggcaacggactcgacaagggggagccggtcaacgcagcagacgcggcggccctcgagcacgacaaggcctacgaccagcagctcaaggccggagacaacccgtacctcaagtacaaccacgccgacgccgagttccaggagcggctcaaagaagatacgtcttttgggggcaacctcgggcgagcagtcttccaggccaaaaagaggcttcttgaacctcttggtctggttgaggaagcggctaagacggctcctggaaagaagaggcctgtagagcagtctcctcaggaaccggactcctccgcgggtattggcaaatcgggtgcacagcccgctaaaaagagactcaatttcggtcagactggcgacacagagtcagtcccagaccctcaaccaatcggagaacctcccgcagccccctcaggtgtgggatctcttacaatggcttcaggtggtggcgcaccagtggcagacaataacgaaggtgccgatggagtgggtagttcctcgggaaattggcattgcgattcccaatggctgggggacagagtcatcaccaccagcacccgaacctgggccctgcccacctacaacaatcacctctacaagcaaatctccaacagcacatctggaggatcttcaaatgacaacgcctacttcggctacagcaccccctgggggtattttgacttcaacagattccactgccacttctcaccacgtgactggcagcgactcatcaacaacaactggggattccggcctaagcgactcaacttcaagctcttcaacattcaggtcaaagaggttacggacaacaatggagtcaagaccatcgccaataaccttaccagcacggtccaggtcttcacggactcagactatcagctcccgtacgtgctcgggtcggctcacgagggctgcctcccgccgttcccagcggacgttttcatgattcctcagtacgggtatctgacgcttaatgatggaagccaggccgtgggtcgttcgtccttttactgcctggaatatttcccgtcgcaaatgctaagaacgggtaacaacttccagttcagctacgagtttgagaacgtacctttccatagcagctacgctcacagccaaagcctggaccgactaatgaatccactcatcgaccaatacttgtactatctctctagaactattaacggttctggacagaatcaacaaacgctaaaattcagtgtggccggacccagcaacatggctgtccagggaagaaactacatacctggacccagctaccgacaacaacgtgtctcaaccactgtgactcaaaacaacaacagcgaatttgcttggcctggagcttcttcttgggctctcaatggacgtaatagcttgatgaatcctggacctgctatggccagccacaaagaaggagaggaccgtttctttcctttgtctggatctttaatttttggcaaacaaggtaccggcagagacaacgtggatgcggacaaagtcatgataaccaacgaagaagaaattaaaactactaacccggtagcaacggagtcctatggacaagtggccacaaaccaccagagtgcacaagagaatcacactagagataaagcacaagctcaaaccggttgggttcaaaaccaaggaatacttccgggtatggtttggcaggacagagatgtgtacctgcaaggacccatttgggccaaaattcctcacacggacggcaactttcacccttctccgctgatgggagggtttggaatgaagcacccgcctcctcagatcctcatcaaaaacacacctgtacctgcggatcctccaacggccttcaacaaggacaagctgaactctttcatcacccagtattctactggccaagtcagcgtggagatcgagtgggagctgcagaaggaaaacagcaagcgctggaacccggagatccagtacacttccaactattacaagtctaataatgttgaatttgctgttaatactgaaggtgtatatagtgaaccccgccccattggcaccagatacctgactcgtaatctg

SEQ ID NO: 184 - DNA, 2229 bp, Adeno-Associated Virus 9
  source 1..2229: mol_type = other DNA
atggctgccgatggttatcttccagattggctcgaggacaaccttagtgaaggaattcgcgagtggtgggctttgaaacctggagcccctcaacccaaggcaaatcaacaacatcaagacaacgctcgaggtcttgtgcttccgggttacaaataccttggacccggcaacggactcgacaagggggagccggtcaacgcagcagacgcggcggccctcgagcacgacaaggcctacgaccagcagctcaaggccggagacaacccgtacctcaagtacaaccacgccgacgccgagttccaggagcggctcaaagaagatacgtcttttgggggcaacctcgggcgagcagtcttccaggccaaaaagaggcttcttgaacctcttggtctggttgaggaagcggctaagacggctcctggaaagaagaggcctgtagagcagtctcctcaggaaccggactcctccgcgggtattggcaaatcgggtgcacagcccgctaaaaagagactcaatttcggtcagactggcgacacagagtcagtcccagaccctcaaccaatcggagaacctcccgcagccccctcaggtgtgggatctcttacaatggcttcaggtggtggcgcaccagtggcagacaataacgaaggtgccgatggagtgggtagttcctcgggaaattggcattgcgattcccaatggctgggggacagagtcatcaccaccagcacccgaacctgggccctgcccacctacaacaatcacctctacaagcaaatctccaacagcacatctggaggatcttcaaatgacaacgcctacttcggctacagcaccccctgggggtattttgacttcaacagattccactgccacttctcaccacgtgactggcagcgactcatcaacaacaactggggattccggcctaagcgactcaacttcaagctcttcaacattcaggtcaaagaggttacggacaacaatggagtcaagaccatcgccaataaccttaccagcacggtccaggtcttcacggactcagactatcagctcccgtacgtgctcgggtcggctcacgagggctgcctcccgccgttcccagcggacgttttcatgattcctcagtacgggtatctgacgcttaatgatggaagccaggccgtgggtcgttcgtccttttactgcctggaatatttcccgtcgcaaatgctaagaacgggtaacaacttccagttcagctacgagtttgagaacgtacctttccatagcagctacgctcacagccaaagcctggaccgactaatgaatccactcatcgaccaatacttgtactatctctctagaactattaacggttctggacagaatcaacaaacgctaaaattcagtgtggccggacccagcaacatggctgtccagggaagaaactacatacctggacccagctaccgacaacaacgtgtctcaaccactgtgactcaaaacaacaacagcgaatttgcttggcctggagcttcttcttgggctctcaatggacgtaatagcttgatgaatcctggacctgctatggccagccacaaagaaggagaggaccgtttctttcctttgtctggatctttaatttttggcaaacaaggtaccggcagagacaacgtggatgcggacaaagtcatgataaccaacgaagaagaaattaaaactactaacccggtagcaacggagtcctatggacaagtggccacaaaccaccagagtgcgcaagaaaaccacactcgcgataaagcacaagcacaaaccggttgggttcaaaaccaaggaatacttccgggtatggtttggcaggacagagatgtgtacctgcaaggacccatttgggccaaaattcctcacacggacggcaactttcacccttctccgctgatgggagggtttggaatgaagcacccgcctcctcagatcctcatcaaaaacacacctgtacctgcggatcctccaacggccttcaacaaggacaagctgaactctttcatcacccagtattctactggccaagtcagcgtggagatcgagtgggagctgcagaaggaaaacagcaagcgctggaacccggagatccagtacacttccaactattacaagtctaataatgttgaatttgctgttaatactgaaggtgtatatagtgaaccccgccccattggcaccagatacctgactcgtaatctg

SEQ ID NO: 185 - DNA, 2229 bp, Adeno-Associated Virus 9
  source 1..2229: mol_type = other DNA
atggctgccgatggttatcttccagattggctcgaggacaaccttagtgaaggaattcgcgagtggtgggctttgaaacctggagcccctcaacccaaggcaaatcaacaacatcaagacaacgctcgaggtcttgtgcttccgggttacaaataccttggacccggcaacggactcgacaagggggagccggtcaacgcagcagacgcggcggccctcgagcacgacaaggcctacgaccagcagctcaaggccggagacaacccgtacctcaagtacaaccacgccgacgccgagttccaggagcggctcaaagaagatacgtcttttgggggcaacctcgggcgagcagtcttccaggccaaaaagaggcttcttgaacctcttggtctggttgaggaagcggctaagacggctcctggaaagaagaggcctgtagagcagtctcctcaggaaccggactcctccgcgggtattggcaaatcgggtgcacagcccgctaaaaagagactcaatttcggtcagactggcgacacagagtcagtcccagaccctcaaccaatcggagaacctcccgcagccccctcaggtgtgggatctcttacaatggcttcaggtggtggcgcaccagtggcagacaataacgaaggtgccgatggagtgggtagttcctcgggaaattggcattgcgattcccaatggctgggggacagagtcatcaccaccagcacccgaacctgggccctgcccacctacaacaatcacctctacaagcaaatctccaacagcacatctggaggatcttcaaatgacaacgcctacttcggctacagcaccccctgggggtattttgacttcaacagattccactgccacttctcaccacgtgactggcagcgactcatcaacaacaactggggattccggcctaagcgactcaacttcaagctcttcaacattcaggtcaaagaggttacggacaacaatggagtcaagaccatcgccaataaccttaccagcacggtccaggtcttcacggactcagactatcagctcccgtacgtgctcgggtcggctcacgagggctgcctcccgccgttcccagcggacgttttcatgattcctcagtacgggtatctgacgcttaatgatggaagccaggccgtgggtcgttcgtccttttactgcctggaatatttcccgtcgcaaatgctaagaacgggtaacaacttccagttcagctacgagtttgagaacgtacctttccatagcagctacgctcacagccaaagcctggaccgactaatgaatccactcatcgaccaatacttgtactatctctctagaactattaacggttctggacagaatcaacaaacgctaaaattcagtgtggccggacccagcaacatggctgtccagggaagaaactacatacctggacccagctaccgacaacaacgtgtctcaaccactgtgactcaaaacaacaacagcgaatttgcttggcctggagcttcttcttgggctctcaatggacgtaatagcttgatgaatcctggacctgctatggccagccacaaagaaggagaggaccgtttctttcctttgtctggatctttaatttttggcaaacaaggtaccggcagagacaacgtggatgcggacaaagtcatgataaccaacgaagaagaaattaaaactactaacccggtagcaacggagtcctatggacaagtggccacaaaccaccagagtgctcaggaaaatcatactcgcgataaggcgcaagcccagaccggttgggttcaaaaccaaggaatacttccgggtatggtttggcaggacagagatgtgtacctgcaaggacccatttgggccaaaattcctcacacggacggcaactttcacccttctccgctgatgggagggtttggaatgaagcacccgcctcctcagatcctcatcaaaaacacacctgtacctgcggatcctccaacggccttcaacaaggacaagctgaactctttcatcacccagtattctactggccaagtcagcgtggagatcgagtgggagctgcagaaggaaaacagcaagcgctggaacccggagatccagtacacttccaactattacaagtctaataatgttgaatttgctgttaatactgaaggtgtatatagtgaaccccgccccattggcaccagatacctgactcgtaatctg

SEQ ID NO: 186 - DNA, 2229 bp, Adeno-Associated Virus 9
  source 1..2229: mol_type = other DNA
atggctgccgatggttatcttccagattggctcgaggacaaccttagtgaaggaattcgcgagtggtgggctttgaaacctggagcccctcaacccaaggcaaatcaacaacatcaagacaacgctcgaggtcttgtgcttccgggttacaaataccttggacccggcaacggactcgacaagggggagccggtcaacgcagcagacgcggcggccctcgagcacgacaaggcctacgaccagcagctcaaggccggagacaacccgtacctcaagtacaaccacgccgacgccgagttccaggagcggctcaaagaagatacgtcttttgggggcaacctcgggcgagcagtcttccaggccaaaaagaggcttcttgaacctcttggtctggttgaggaagcggctaagacggctcctggaaagaagaggcctgtagagcagtctcctcaggaaccggactcctccgcgggtattggcaaatcgggtgcacagcccgctaaaaagagactcaatttcggtcagactggcgacacagagtcagtcccagaccctcaaccaatcggagaacctcccgcagccccctcaggtgtgggatctcttacaatggcttcaggtggtggcgcaccagtggcagacaataacgaaggtgccgatggagtgggtagttcctcgggaaattggcattgcgattcccaatggctgggggacagagtcatcaccaccagcacccgaacctgggccctgcccacctacaacaatcacctctacaagcaaatctccaacagcacatctggaggatcttcaaatgacaacgcctacttcggctacagcaccccctgggggtattttgacttcaacagattccactgccacttctcaccacgtgactggcagcgactcatcaacaacaactggggattccggcctaagcgactcaacttcaagctcttcaacattcaggtcaaagaggttacggacaacaatggagtcaagaccatcgccaataaccttaccagcacggtccaggtcttcacggactcagactatcagctcccgtacgtgctcgggtcggctcacgagggctgcctcccgccgttcccagcggacgttttcatgattcctcagtacgggtatctgacgcttaatgatggaagccaggccgtgggtcgttcgtccttttactgcctggaatatttcccgtcgcaaatgctaagaacgggtaacaacttccagttcagctacgagtttgagaacgtacctttccatagcagctacgctcacagccaaagcctggaccgactaatgaatccactcatcgaccaatacttgtactatctctctagaactattaacggttctggacagaatcaacaaacgctaaaattcagtgtggccggacccagcaacatggctgtccagggaagaaactacatacctggacccagctaccgacaacaacgtgtctcaaccactgtgactcaaaacaacaacagcgaatttgcttggcctggagcttcttcttgggctctcaatggacgtaatagcttgatgaatcctggacctgctatggccagccacaaagaaggagaggaccgtttctttcctttgtctggatctttaatttttggcaaacaaggtaccggcagagacaacgtggatgcggacaaagtcatgataaccaacgaagaagaaattaaaactactaacccggtagcaacggagtcctatggacaagtggccacaaaccaccagagtgctcaggaaaaccatacaagggacaaggcgcaggcgcagaccggttgggttcaaaaccaaggaatacttccgggtatggtttggcaggacagagatgtgtacctgcaaggacccatttgggccaaaattcctcacacggacggcaactttcacccttctccgctgatgggagggtttggaatgaagcacccgcctcctcagatcctcatcaaaaacacacctgtacctgcggatcctccaacggccttcaacaaggacaagctgaactctttcatcacccagtattctactggccaagtcagcgtggagatcgagtgggagctgcagaaggaaaacagcaagcgctggaacccggagatccagtacacttccaactattacaagtctaataatgttgaatttgctgttaatactgaaggtgtatatagtgaaccccgccccattggcaccagatacctgactcgtaatctg

SEQ ID NO: 187 - DNA, 2229 bp, Adeno-Associated Virus 9
  source 1..2229: mol_type = other DNA
atggctgccgatggttatcttccagattggctcgaggacaaccttagtgaaggaattcgcgagtggtgggctttgaaacctggagcccctcaacccaaggcaaatcaacaacatcaagacaacgctcgaggtcttgtgcttccgggttacaaataccttggacccggcaacggactcgacaagggggagccggtcaacgcagcagacgcggcggccctcgagcacgacaaggcctacgaccagcagctcaaggccggagacaacccgtacctcaagtacaaccacgccgacgccgagttccaggagcggctcaaagaagatacgtcttttgggggcaacctcgggcgagcagtcttccaggccaaaaagaggcttcttgaacctcttggtctggttgaggaagcggctaagacggctcctggaaagaagaggcctgtagagcagtctcctcaggaaccggactcctccgcgggtattggcaaatcgggtgcacagcccgctaaaaagagactcaatttcggtcagactggcgacacagagtcagtcccagaccctcaaccaatcggagaacctcccgcagccccctcaggtgtgggatctcttacaatggcttcaggtggtggcgcaccagtggcagacaataacgaaggtgccgatggagtgggtagttcctcgggaaattggcattgcgattcccaatggctgggggacagagtcatcaccaccagcacccgaacctgggccctgcccacctacaacaatcacctctacaagcaaatctccaacagcacatctggaggatcttcaaatgacaacgcctacttcggctacagcaccccctgggggtattttgacttcaacagattccactgccacttctcaccacgtgactggcagcgactcatcaacaacaactggggattccggcctaagcgactcaacttcaagctcttcaacattcaggtcaaagaggttacggacaacaatggagtcaagaccatcgccaataaccttaccagcacggtccaggtcttcacggactcagactatcagctcccgtacgtgctcgggtcggctcacgagggctgcctcccgccgttcccagcggacgttttcatgattcctcagtacgggtatctgacgcttaatgatggaagccaggccgtgggtcgttcgtccttttactgcctggaatatttcccgtcgcaaatgctaagaacgggtaacaacttccagttcagctacgagtttgagaacgtacctttccatagcagctacgctcacagccaaagcctggaccgactaatgaatccactcatcgaccaatacttgtactatctctctagaactattaacggttctggacagaatcaacaaacgctaaaattcagtgtggccggacccagcaacatggctgtccagggaagaaactacatacctggacccagctaccgacaacaacgtgtctcaaccactgtgactcaaaacaacaacagcgaatttgcttggcctggagcttcttcttgggctctcaatggacgtaatagcttgatgaatcctggacctgctatggccagccacaaagaaggagaggaccgtttctttcctttgtctggatctttaatttttggcaaacaaggtaccggcagagacaacgtggatgcggacaaagtcatgataaccaacgaagaagaaattaaaactactaacccggtagcaacggagtcctatggacaagtggccacaaaccaccagagtgcccaagagaaccacacgcgagacaaagctcaggcgcaaaccggttgggttcaaaaccaaggaatacttccgggtatggtttggcaggacagagatgtgtacctgcaaggacccatttgggccaaaattcctcacacggacggcaactttcacccttctccgctgatgggagggtttggaatgaagcacccgcctcctcagatcctcatcaaaaacacacctgtacctgcggatcctccaacggccttcaacaaggacaagctgaactctttcatcacccagtattctactggccaagtcagcgtggagatcgagtgggagctgcagaaggaaaacagcaagcgctggaacccggagatccagtacacttccaactattacaagtctaataatgttgaatttgctgttaatactgaaggtgtatatagtgaaccccgccccattggcaccagatacctgactcgtaatctg

SEQ ID NO: 188 - DNA, 2229 bp, Adeno-Associated Virus 9
  source 1..2229: mol_type = other DNA
atggctgccgatggttatcttccagattggctcgaggacaaccttagtgaaggaattcgcgagtggtgggctttgaaacctggagcccctcaacccaaggcaaatcaacaacatcaagacaacgctcgaggtcttgtgcttccgggttacaaataccttggacccggcaacggactcgacaagggggagccggtcaacgcagcagacgcggcggccctcgagcacgacaaggcctacgaccagcagctcaaggccggagacaacccgtacctcaagtacaaccacgccgacgccgagttccaggagcggctcaaagaagatacgtcttttgggggcaacctcgggcgagcagtcttccaggccaaaaagaggcttcttgaacctcttggtctggttgaggaagcggctaagacggctcctggaaagaagaggcctgtagagcagtctcctcaggaaccggactcctccgcgggtattggcaaatcgggtgcacagcccgctaaaaagagactcaatttcggtcagactggcgacacagagtcagtcccagaccctcaaccaatcggagaacctcccgcagccccctcaggtgtgggatctcttacaatggcttcaggtggtggcgcaccagtggcagacaataacgaaggtgccgatggagtgggtagttcctcgggaaattggcattgcgattcccaatggctgggggacagagtcatcaccaccagcacccgaacctgggccctgcccacctacaacaatcacctctacaagcaaatctccaacagcacatctggaggatcttcaaatgacaacgcctacttcggctacagcaccccctgggggtattttgacttcaacagattccactgccacttctcaccacgtgactggcagcgactcatcaacaacaactggggattccggcctaagcgactcaacttcaagctcttcaacattcaggtcaaagaggttacggacaacaatggagtcaagaccatcgccaataaccttaccagcacggtccaggtcttcacggactcagactatcagctcccgtacgtgctcgggtcggctcacgagggctgcctcccgccgttcccagcggacgttttcatgattcctcagtacgggtatctgacgcttaatgatggaagccaggccgtgggtcgttcgtccttttactgcctggaatatttcccgtcgcaaatgctaagaacgggtaacaacttccagttcagctacgagtttgagaacgtacctttccatagcagctacgctcacagccaaagcctggaccgactaatgaatccactcatcgaccaatacttgtactatctctctagaactattaacggttctggacagaatcaacaaacgctaaaattcagtgtggccggacccagcaacatggctgtccagggaagaaactacatacctggacccagctaccgacaacaacgtgtctcaaccactgtgactcaaaacaacaacagcgaatttgcttggcctggagcttcttcttgggctctcaatggacgtaatagcttgatgaatcctggacctgctatggccagccacaaagaaggagaggaccgtttctttcctttgtctggatctttaatttttggcaaacaaggtaccggcagagacaacgtggatgcggacaaagtcatgataaccaacgaagaagaaattaaaactactaacccggtagcaacggagtcctatggacaagtggccacaaaccaccagagtgctcaagaaaatcacacgagagacaaggcccaagcgcaaaccggttgggttcaaaaccaaggaatacttccgggtatggtttggcaggacagagatgtgtacctgcaaggacccatttgggccaaaattcctcacacggacggcaactttcacccttctccgctgatgggagggtttggaatgaagcacccgcctcctcagatcctcatcaaaaacacacctgtacctgcggatcctccaacggccttcaacaaggacaagctgaactctttcatcacccagtattctactggccaagtcagcgtggagatcgagtgggagctgcagaaggaaaacagcaagcgctggaacccggagatccagtacacttccaactattacaagtctaataatgttgaatttgctgttaatactgaaggtgtatatagtgaaccccgccccattggcaccagatacctgactcgtaatctg

SEQ ID NO: 189 - DNA, 2229 bp, Adeno-Associated Virus 9
  source 1..2229: mol_type = other DNA
atggctgccgatggttatcttccagattggctcgaggacaaccttagtgaaggaattcgcgagtggtgggctttgaaacctggagcccctcaacccaaggcaaatcaacaacatcaagacaacgctcgaggtcttgtgcttccgggttacaaataccttggacccggcaacggactcgacaagggggagccggtcaacgcagcagacgcggcggccctcgagcacgacaaggcctacgaccagcagctcaaggccggagacaacccgtacctcaagtacaaccacgccgacgccgagttccaggagcggctcaaagaagatacgtcttttgggggcaacctcgggcgagcagtcttccaggccaaaaagaggcttcttgaacctcttggtctggttgaggaagcggctaagacggctcctggaaagaagaggcctgtagagcagtctcctcaggaaccggactcctccgcgggtattggcaaatcgggtgcacagcccgctaaaaagagactcaatttcggtcagactggcgacacagagtcagtcccagaccctcaaccaatcggagaacctcccgcagccccctcaggtgtgggatctcttacaatggcttcaggtggtggcgcaccagtggcagacaataacgaaggtgccgatggagtgggtagttcctcgggaaattggcattgcgattcccaatggctgggggacagagtcatcaccaccagcacccgaacctgggccctgcccacctacaacaatcacctctacaagcaaatctccaacagcacatctggaggatcttcaaatgacaacgcctacttcggctacagcaccccctgggggtattttgacttcaacagattccactgccacttctcaccacgtgactggcagcgactcatcaacaacaactggggattccggcctaagcgactcaacttcaagctcttcaacattcaggtcaaagaggttacggacaacaatggagtcaagaccatcgccaataaccttaccagcacggtccaggtcttcacggactcagactatcagctcccgtacgtgctcgggtcggctcacgagggctgcctcccgccgttcccagcggacgttttcatgattcctcagtacgggtatctgacgcttaatgatggaagccaggccgtgggtcgttcgtccttttactgcctggaatatttcccgtcgcaaatgctaagaacgggtaacaacttccagttcagctacgagtttgagaacgtacctttccatagcagctacgctcacagccaaagcctggaccgactaatgaatccactcatcgaccaatacttgtactatctctctagaactattaacggttctggacagaatcaacaaacgctaaaattcagtgtggccggacccagcaacatggctgtccagggaagaaactacatacctggacccagctaccgacaacaacgtgtctcaaccactgtgactcaaaacaacaacagcgaatttgcttggcctggagcttcttcttgggctctcaatggacgtaatagcttgatgaatcctggacctgctatggccagccacaaagaaggagaggaccgtttctttcctttgtctggatctttaatttttggcaaacaaggtaccggcagagacaacgtggatgcggacaaagtcatgataaccaacgaagaagaaattaaaactactaacccggtagcaacggagtcctatggacaagtggccacaaaccaccagagtgctcaagaaaaccacacgcgagacaaggcccaggcgcaaaccggttgggttcaaaaccaaggaatacttccgggtatggtttggcaggacagagatgtgtacctgcaaggacccatttgggccaaaattcctcacacggacggcaactttcacccttctccgctgatgggagggtttggaatgaagcacccgcctcctcagatcctcatcaaaaacacacctgtacctgcggatcctccaacggccttcaacaaggacaagctgaactctttcatcacccagtattctactggccaagtcagcgtggagatcgagtgggagctgcagaaggaaaacagcaagcgctggaacccggagatccagtacacttccaactattacaagtctaataatgttgaatttgctgttaatactgaaggtgtatatagtgaaccccgccccattggcaccagatacctgactcgtaatctg

SEQ ID NO: 190 - DNA, 2229 bp, Adeno-Associated Virus 9
  source 1..2229: mol_type = other DNA
atggctgccgatggttatcttccagattggctcgaggacaaccttagtgaaggaattcgcgagtggtgggctttgaaacctggagcccctcaacccaaggcaaatcaacaacatcaagacaacgctcgaggtcttgtgcttccgggttacaaataccttggacccggcaacggactcgacaagggggagccggtcaacgcagcagacgcggcggccctcgagcacgacaaggcctacgaccagcagctcaaggccggagacaacccgtacctcaagtacaaccacgccgacgccgagttccaggagcggctcaaagaagatacgtcttttgggggcaacctcgggcgagcagtcttccaggccaaaaagaggcttcttgaacctcttggtctggttgaggaagcggctaagacggctcctggaaagaagaggcctgtagagcagtctcctcaggaaccggactcctccgcgggtattggcaaatcgggtgcacagcccgctaaaaagagactcaatttcggtcagactggcgacacagagtcagtcccagaccctcaaccaatcggagaacctcccgcagccccctcaggtgtgggatctcttacaatggcttcaggtggtggcgcaccagtggcagacaataacgaaggtgccgatggagtgggtagttcctcgggaaattggcattgcgattcccaatggctgggggacagagtcatcaccaccagcacccgaacctgggccctgcccacctacaacaatcacctctacaagcaaatctccaacagcacatctggaggatcttcaaatgacaacgcctacttcggctacagcaccccctgggggtattttgacttcaacagattccactgccacttctcaccacgtgactggcagcgactcatcaacaacaactggggattccggcctaagcgactcaacttcaagctcttcaacattcaggtcaaagaggttacggacaacaatggagtcaagaccatcgccaataaccttaccagcacggtccaggtcttcacggactcagactatcagctcccgtacgtgctcgggtcggctcacgagggctgcctcccgccgttcccagcggacgttttcatgattcctcagtacgggtatctgacgcttaatgatggaagccaggccgtgggtcgttcgtccttttactgcctggaatatttcccgtcgcaaatgctaagaacgggtaacaacttccagttcagctacgagtttgagaacgtacctttccatagcagctacgctcacagccaaagcctggaccgactaatgaatccactcatcgaccaatacttgtactatctctctagaactattaacggttctggacagaatcaacaaacgctaaaattcagtgtggccggacccagcaacatggctgtccagggaagaaactacatacctggacccagctaccgacaacaacgtgtctcaaccactgtgactcaaaacaacaacagcgaatttgcttggcctggagcttcttcttgggctctcaatggacgtaatagcttgatgaatcctggacctgctatggccagccacaaagaaggagaggaccgtttctttcctttgtctggatctttaatttttggcaaacaaggtaccggcagagacaacgtggatgcggacaaagtcatgataaccaacgaagaagaaattaaaactactaacccggtagcaacggagtcctatggacaagtggccacaaaccaccagagtgctcaggagaatcatacccgggacaaggcgcaggcccagaccggttgggttcaaaaccaaggaatacttccgggtatggtttggcaggacagagatgtgtacctgcaaggacccatttgggccaaaattcctcacacggacggcaactttcacccttctccgctgatgggagggtttggaatgaagcacccgcctcctcagatcctcatcaaaaacacacctgtacctgcggatcctccaacggccttcaacaaggacaagctgaactctttcatcacccagtattctactggccaagtcagcgtggagatcgagtgggagctgcagaaggaaaacagcaagcgctggaacccggagatccagtacacttccaactattacaagtctaataatgttgaatttgctgttaatactgaaggtgtatatagtgaaccccgccccattggcaccagatacctgactcgtaatctg

SEQ ID NO: 191 - DNA, 2229 bp, Adeno-Associated Virus 9
  source 1..2229: mol_type = other DNA
atggctgccgatggttatcttccagattggctcgaggacaaccttagtgaaggaattcgcgagtggtgggctttgaaacctggagcccctcaacccaaggcaaatcaacaacatcaagacaacgctcgaggtcttgtgcttccgggttacaaataccttggacccggcaacggactcgacaagggggagccggtcaacgcagcagacgcggcggccctcgagcacgacaaggcctacgaccagcagctcaaggccggagacaacccgtacctcaagtacaaccacgccgacgccgagttccaggagcggctcaaagaagatacgtcttttgggggcaacctcgggcgagcagtcttccaggccaaaaagaggcttcttgaacctcttggtctggttgaggaagcggctaagacggctcctggaaagaagaggcctgtagagcagtctcctcaggaaccggactcctccgcgggtattggcaaatcgggtgcacagcccgctaaaaagagactcaatttcggtcagactggcgacacagagtcagtcccagaccctcaaccaatcggagaacctcccgcagccccctcaggtgtgggatctcttacaatggcttcaggtggtggcgcaccagtggcagacaataacgaaggtgccgatggagtgggtagttcctcgggaaattggcattgcgattcccaatggctgggggacagagtcatcaccaccagcacccgaacctgggccctgcccacctacaacaatcacctctacaagcaaatctccaacagcacatctggaggatcttcaaatgacaacgcctacttcggctacagcaccccctgggggtattttgacttcaacagattccactgccacttctcaccacgtgactggcagcgactcatcaacaacaactggggattccggcctaagcgactcaacttcaagctcttcaacattcaggtcaaagaggttacggacaacaatggagtcaagaccatcgccaataaccttaccagcacggtccaggtcttcacggactcagactatcagctcccgtacgtgctcgggtcggctcacgagggctgcctcccgccgttcccagcggacgttttcatgattcctcagtacgggtatctgacgcttaatgatggaagccaggccgtgggtcgttcgtccttttactgcctggaatatttcccgtcgcaaatgctaagaacgggtaacaacttccagttcagctacgagtttgagaacgtacctttccatagcagctacgctcacagccaaagcctggaccgactaatgaatccactcatcgaccaatacttgtactatctctctagaactattaacggttctggacagaatcaacaaacgctaaaattcagtgtggccggacccagcaacatggctgtccagggaagaaactacatacctggacccagctaccgacaacaacgtgtctcaaccactgtgactcaaaacaacaacagcgaatttgcttggcctggagcttcttcttgggctctcaatggacgtaatagcttgatgaatcctggacctgctatggccagccacaaagaaggagaggaccgtttctttcctttgtctggatctttaatttttggcaaacaaggtaccggcagagacaacgtggatgcggacaaagtcatgataaccaacgaagaagaaattaaaactactaacccggtagcaacggagtcctatggacaagtggccacaaaccaccagagtgcgcagggaaacgatacgagatccacggcgcaagcacagaccggttgggttcaaaaccaaggaatacttccgggtatggtttggcaggacagagatgtgtacctgcaaggacccatttgggccaaaattcctcacacggacggcaactttcacccttctccgctgatgggagggtttggaatgaagcacccgcctcctcagatcctcatcaaaaacacacctgtacctgcggatcctccaacggccttcaacaaggacaagctgaactctttcatcacccagtattctactggccaagtcagcgtggagatcgagtgggagctgcagaaggaaaacagcaagcgctggaacccggagatccagtacacttccaactattacaagtctaataatgttgaatttgctgttaatactgaaggtgtatatagtgaaccccgccccattggcaccagatacctgactcgtaatctg

SEQ ID NO: 192 - DNA, 2229 bp, Adeno-Associated Virus 9
  source 1..2229: mol_type = other DNA
atggctgccgatggttatcttccagattggctcgaggacaaccttagtgaaggaattcgcgagtggtgggctttgaaacctggagcccctcaacccaaggcaaatcaacaacatcaagacaacgctcgaggtcttgtgcttccgggttacaaataccttggacccggcaacggactcgacaagggggagccggtcaacgcagcagacgcggcggccctcgagcacgacaaggcctacgaccagcagctcaaggccggagacaacccgtacctcaagtacaaccacgccgacgccgagttccaggagcggctcaaagaagatacgtcttttgggggcaacctcgggcgagcagtcttccaggccaaaaagaggcttcttgaacctcttggtctggttgaggaagcggctaagacggctcctggaaagaagaggcctgtagagcagtctcctcaggaaccggactcctccgcgggtattggcaaatcgggtgcacagcccgctaaaaagagactcaatttcggtcagactggcgacacagagtcagtcccagaccctcaaccaatcggagaacctcccgcagccccctcaggtgtgggatctcttacaatggcttcaggtggtggcgcaccagtggcagacaataacgaaggtgccgatggagtgggtagttcctcgggaaattggcattgcgattcccaatggctgggggacagagtcatcaccaccagcacccgaacctgggccctgcccacctacaacaatcacctctacaagcaaatctccaacagcacatctggaggatcttcaaatgacaacgcctacttcggctacagcaccccctgggggtattttgacttcaacagattccactgccacttctcaccacgtgactggcagcgactcatcaacaacaactggggattccggcctaagcgactcaacttcaagctcttcaacattcaggtcaaagaggttacggacaacaatggagtcaagaccatcgccaataaccttaccagcacggtccaggtcttcacggactcagactatcagctcccgtacgtgctcgggtcggctcacgagggctgcctcccgccgttcccagcggacgttttcatgattcctcagtacgggtatctgacgcttaatgatggaagccaggccgtgggtcgttcgtccttttactgcctggaatatttcccgtcgcaaatgctaagaacgggtaacaacttccagttcagctacgagtttgagaacgtacctttccatagcagctacgctcacagccaaagcctggaccgactaatgaatccactcatcgaccaatacttgtactatctctctagaactattaacggttctggacagaatcaacaaacgctaaaattcagtgtggccggacccagcaacatggctgtccagggaagaaactacatacctggacccagctaccgacaacaacgtgtctcaaccactgtgactcaaaacaacaacagcgaatttgcttggcctggagcttcttcttgggctctcaatggacgtaatagcttgatgaatcctggacctgctatggccagccacaaagaaggagaggaccgtttctttcctttgtctggatctttaatttttggcaaacaaggtaccggcagagacaacgtggatgcggacaaagtcatgataaccaacgaagaagaaattaaaactactaacccggtagcaacggagtcctatggacaagtggccacaaaccaccagagtgcccagggaaacgacacacgttcgaccgcacaggcacagaccggttgggttcaaaaccaaggaatacttccgggtatggtttggcaggacagagatgtgtacctgcaaggacccatttgggccaaaattcctcacacggacggcaactttcacccttctccgctgatgggagggtttggaatgaagcacccgcctcctcagatcctcatcaaaaacacacctgtacctgcggatcctccaacggccttcaacaaggacaagctgaactctttcatcacccagtattctactggccaagtcagcgtggagatcgagtgggagctgcagaaggaaaacagcaagcgctggaacccggagatccagtacacttccaactattacaagtctaataatgttgaatttgctgttaatactgaaggtgtatatagtgaaccccgccccattggcaccagatacctgactcgtaatctg

SEQ ID NO: 193 - DNA, 2229 bp, Adeno-Associated Virus 9
  source 1..2229: mol_type = other DNA
atggctgccgatggttatcttccagattggctcgaggacaaccttagtgaaggaattcgcgagtggtgggctttgaaacctggagcccctcaacccaaggcaaatcaacaacatcaagacaacgctcgaggtcttgtgcttccgggttacaaataccttggacccggcaacggactcgacaagggggagccggtcaacgcagcagacgcggcggccctcgagcacgacaaggcctacgaccagcagctcaaggccggagacaacccgtacctcaagtacaaccacgccgacgccgagttccaggagcggctcaaagaagatacgtcttttgggggcaacctcgggcgagcagtcttccaggccaaaaagaggcttcttgaacctcttggtctggttgaggaagcggctaagacggctcctggaaagaagaggcctgtagagcagtctcctcaggaaccggactcctccgcgggtattggcaaatcgggtgcacagcccgctaaaaagagactcaatttcggtcagactggcgacacagagtcagtcccagaccctcaaccaatcggagaacctcccgcagccccctcaggtgtgggatctcttacaatggcttcaggtggtggcgcaccagtggcagacaataacgaaggtgccgatggagtgggtagttcctcgggaaattggcattgcgattcccaatggctgggggacagagtcatcaccaccagcacccgaacctgggccctgcccacctacaacaatcacctctacaagcaaatctccaacagcacatctggaggatcttcaaatgacaacgcctacttcggctacagcaccccctgggggtattttgacttcaacagattccactgccacttctcaccacgtgactggcagcgactcatcaacaacaactggggattccggcctaagcgactcaacttcaagctcttcaacattcaggtcaaagaggttacggacaacaatggagtcaagaccatcgccaataaccttaccagcacggtccaggtcttcacggactcagactatcagctcccgtacgtgctcgggtcggctcacgagggctgcctcccgccgttcccagcggacgttttcatgattcctcagtacgggtatctgacgcttaatgatggaagccaggccgtgggtcgttcgtccttttactgcctggaatatttcccgtcgcaaatgctaagaacgggtaacaacttccagttcagctacgagtttgagaacgtacctttccatagcagctacgctcacagccaaagcctggaccgactaatgaatccactcatcgaccaatacttgtactatctctctagaactattaacggttctggacagaatcaacaaacgctaaaattcagtgtggccggacccagcaacatggctgtccagggaagaaactacatacctggacccagctaccgacaacaacgtgtctcaaccactgtgactcaaaacaacaacagcgaatttgcttggcctggagcttcttcttgggctctcaatggacgtaatagcttgatgaatcctggacctgctatggccagccacaaagaaggagaggaccgtttctttcctttgtctggatctttaatttttggcaaacaaggtaccggcagagacaacgtggatgcggacaaagtcatgataaccaacgaagaagaaattaaaactactaacccggtagcaacggagtcctatggacaagtggccacaaaccaccagagtgctcaaggtaatgatactcgttccacggcacaagcccaaaccggttgggttcaaaaccaaggaatacttccgggtatggtttggcaggacagagatgtgtacctgcaaggacccatttgggccaaaattcctcacacggacggcaactttcacccttctccgctgatgggagggtttggaatgaagcacccgcctcctcagatcctcatcaaaaacacacctgtacctgcggatcctccaacggccttcaacaaggacaagctgaactctttcatcacccagtattctactggccaagtcagcgtggagatcgagtgggagctgcagaaggaaaacagcaagcgctggaacccggagatccagtacacttccaactattacaagtctaataatgttgaatttgctgttaatactgaaggtgtatatagtgaaccccgccccattggcaccagatacctgactcgtaatctg

SEQ ID NO: 194 - DNA, 2229 bp, Adeno-Associated Virus 9
  source 1..2229: mol_type = other DNA
atggctgccgatggttatcttccagattggctcgaggacaaccttagtgaaggaattcgcgagtggtgggctttgaaacctggagcccctcaacccaaggcaaatcaacaacatcaagacaacgctcgaggtcttgtgcttccgggttacaaataccttggacccggcaacggactcgacaagggggagccggtcaacgcagcagacgcggcggccctcgagcacgacaaggcctacgaccagcagctcaaggccggagacaacccgtacctcaagtacaaccacgccgacgccgagttccaggagcggctcaaagaagatacgtcttttgggggcaacctcgggcgagcagtcttccaggccaaaaagaggcttcttgaacctcttggtctggttgaggaagcggctaagacggctcctggaaagaagaggcctgtagagcagtctcctcaggaaccggactcctccgcgggtattggcaaatcgggtgcacagcccgctaaaaagagactcaatttcggtcagactggcgacacagagtcagtcccagaccctcaaccaatcggagaacctcccgcagccccctcaggtgtgggatctcttacaatggcttcaggtggtggcgcaccagtggcagacaataacgaaggtgccgatggagtgggtagttcctcgggaaattggcattgcgattcccaatggctgggggacagagtcatcaccaccagcacccgaacctgggccctgcccacctacaacaatcacctctacaagcaaatctccaacagcacatctggaggatcttcaaatgacaacgcctacttcggctacagcaccccctgggggtattttgacttcaacagattccactgccacttctcaccacgtgactggcagcgactcatcaacaacaactggggattccggcctaagcgactcaacttcaagctcttcaacattcaggtcaaagaggttacggacaacaatggagtcaagaccatcgccaataaccttaccagcacggtccaggtcttcacggactcagactatcagctcccgtacgtgctcgggtcggctcacgagggctgcctcccgccgttcccagcggacgttttcatgattcctcagtacgggtatctgacgcttaatgatggaagccaggccgtgggtcgttcgtccttttactgcctggaatatttcccgtcgcaaatgctaagaacgggtaacaacttccagttcagctacgagtttgagaacgtacctttccatagcagctacgctcacagccaaagcctggaccgactaatgaatccactcatcgaccaatacttgtactatctctctagaactattaacggttctggacagaatcaacaaacgctaaaattcagtgtggccggacccagcaacatggctgtccagggaagaaactacatacctggacccagctaccgacaacaacgtgtctcaaccactgtgactcaaaacaacaacagcgaatttgcttggcctggagcttcttcttgggctctcaatggacgtaatagcttgatgaatcctggacctgctatggccagccacaaagaaggagaggaccgtttctttcctttgtctggatctttaatttttggcaaacaaggtaccggcagagacaacgtggatgcggacaaagtcatgataaccaacgaagaagaaattaaaactactaacccggtagcaacggagtcctatggacaagtggccacaaaccaccagagtgcacagggtaacgatacgcgaagcacagctcaagcacaaaccggttgggttcaaaaccaaggaatacttccgggtatggtttggcaggacagagatgtgtacctgcaaggacccatttgggccaaaattcctcacacggacggcaactttcacccttctccgctgatgggagggtttggaatgaagcacccgcctcctcagatcctcatcaaaaacacacctgtacctgcggatcctccaacggccttcaacaaggacaagctgaactctttcatcacccagtattctactggccaagtcagcgtggagatcgagtgggagctgcagaaggaaaacagcaagcgctggaacccggagatccagtacacttccaactattacaagtctaataatgttgaatttgctgttaatactgaaggtgtatatagtgaaccccgccccattggcaccagatacctgactcgtaatctg

SEQ ID NO: 195 - DNA, 2229 bp, Adeno-Associated Virus 9
  source 1..2229: mol_type = other DNA
atggctgccgatggttatcttccagattggctcgaggacaaccttagtgaaggaattcgcgagtggtgggctttgaaacctggagcccctcaacccaaggcaaatcaacaacatcaagacaacgctcgaggtcttgtgcttccgggttacaaataccttggacccggcaacggactcgacaagggggagccggtcaacgcagcagacgcggcggccctcgagcacgacaaggcctacgaccagcagctcaaggccggagacaacccgtacctcaagtacaaccacgccgacgccgagttccaggagcggctcaaagaagatacgtcttttgggggcaacctcgggcgagcagtcttccaggccaaaaagaggcttcttgaacctcttggtctggttgaggaagcggctaagacggctcctggaaagaagaggcctgtagagcagtctcctcaggaaccggactcctccgcgggtattggcaaatcgggtgcacagcccgctaaaaagagactcaatttcggtcagactggcgacacagagtcagtcccagaccctcaaccaatcggagaacctcccgcagccccctcaggtgtgggatctcttacaatggcttcaggtggtggcgcaccagtggcagacaataacgaaggtgccgatggagtgggtagttcctcgggaaattggcattgcgattcccaatggctgggggacagagtcatcaccaccagcacccgaacctgggccctgcccacctacaacaatcacctctacaagcaaatctccaacagcacatctggaggatcttcaaatgacaacgcctacttcggctacagcaccccctgggggtattttgacttcaacagattccactgccacttctcaccacgtgactggcagcgactcatcaacaacaactggggattccggcctaagcgactcaacttcaagctcttcaacattcaggtcaaagaggttacggacaacaatggagtcaagaccatcgccaataaccttaccagcacggtccaggtcttcacggactcagactatcagctcccgtacgtgctcgggtcggctcacgagggctgcctcccgccgttcccagcggacgttttcatgattcctcagtacgggtatctgacgcttaatgatggaagccaggccgtgggtcgttcgtccttttactgcctggaatatttcccgtcgcaaatgctaagaacgggtaacaacttccagttcagctacgagtttgagaacgtacctttccatagcagctacgctcacagccaaagcctggaccgactaatgaatccactcatcgaccaatacttgtactatctctctagaactattaacggttctggacagaatcaacaaacgctaaaattcagtgtggccggacccagcaacatggctgtccagggaagaaactacatacctggacccagctaccgacaacaacgtgtctcaaccactgtgactcaaaacaacaacagcgaatttgcttggcctggagcttcttcttgggctctcaatggacgtaatagcttgatgaatcctggacctgctatggccagccacaaagaaggagaggaccgtttctttcctttgtctggatctttaatttttggcaaacaaggtaccggcagagacaacgtggatgcggacaaagtcatgataaccaacgaagaagaaattaaaactactaacccggtagcaacggagtcctatggacaagtggccacaaaccaccagagtgcacagggtaacgatacgcggtccacagcacaggcacagaccggttgggttcaaaaccaaggaatacttccgggtatggtttggcaggacagagatgtgtacctgcaaggacccatttgggccaaaattcctcacacggacggcaactttcacccttctccgctgatgggagggtttggaatgaagcacccgcctcctcagatcctcatcaaaaacacacctgtacctgcggatcctccaacggccttcaacaaggacaagctgaactctttcatcacccagtattctactggccaagtcagcgtggagatcgagtgggagctgcagaaggaaaacagcaagcgctggaacccggagatccagtacacttccaactattacaagtctaataatgttgaatttgctgttaatactgaaggtgtatatagtgaaccccgccccattggcaccagatacctgactcgtaatctg

SEQ ID NO: 196 - DNA, 2229 bp, Adeno-Associated Virus 9
  source 1..2229: mol_type = other DNA
atggctgccgatggttatcttccagattggctcgaggacaaccttagtgaaggaattcgcgagtggtgggctttgaaacctggagcccctcaacccaaggcaaatcaacaacatcaagacaacgctcgaggtcttgtgcttccgggttacaaataccttggacccggcaacggactcgacaagggggagccggtcaacgcagcagacgcggcggccctcgagcacgacaaggcctacgaccagcagctcaaggccggagacaacccgtacctcaagtacaaccacgccgacgccgagttccaggagcggctcaaagaagatacgtcttttgggggcaacctcgggcgagcagtcttccaggccaaaaagaggcttcttgaacctcttggtctggttgaggaagcggctaagacggctcctggaaagaagaggcctgtagagcagtctcctcaggaaccggactcctccgcgggtattggcaaatcgggtgcacagcccgctaaaaagagactcaatttcggtcagactggcgacacagagtcagtcccagaccctcaaccaatcggagaacctcccgcagccccctcaggtgtgggatctcttacaatggcttcaggtggtggcgcaccagtggcagacaataacgaaggtgccgatggagtgggtagttcctcgggaaattggcattgcgattcccaatggctgggggacagagtcatcaccaccagcacccgaacctgggccctgcccacctacaacaatcacctctacaagcaaatctccaacagcacatctggaggatcttcaaatgacaacgcctacttcggctacagcaccccctgggggtattttgacttcaacagattccactgccacttctcaccacgtgactggcagcgactcatcaacaacaactggggattccggcctaagcgactcaacttcaagctcttcaacattcaggtcaaagaggttacggacaacaatggagtcaagaccatcgccaataaccttaccagcacggtccaggtcttcacggactcagactatcagctcccgtacgtgctcgggtcggctcacgagggctgcctcccgccgttcccagcggacgttttcatgattcctcagtacgggtatctgacgcttaatgatggaagccaggccgtgggtcgttcgtccttttactgcctggaatatttcccgtcgcaaatgctaagaacgggtaacaacttccagttcagctacgagtttgagaacgtacctttccatagcagctacgctcacagccaaagcctggaccgactaatgaatccactcatcgaccaatacttgtactatctctctagaactattaacggttctggacagaatcaacaaacgctaaaattcagtgtggccggacccagcaacatggctgtccagggaagaaactacatacctggacccagctaccgacaacaacgtgtctcaaccactgtgactcaaaacaacaacagcgaatttgcttggcctggagcttcttcttgggctctcaatggacgtaatagcttgatgaatcctggacctgctatggccagccacaaagaaggagaggaccgtttctttcctttgtctggatctttaatttttggcaaacaaggtaccggcagagacaacgtggatgcggacaaagtcatgataaccaacgaagaagaaattaaaactactaacccggtagcaacggagtcctatggacaagtggccacaaaccaccagagtgctcaagggaatgatacgagaagtactgctcaagcgcaaaccggttgggttcaaaaccaaggaatacttccgggtatggtttggcaggacagagatgtgtacctgcaaggacccatttgggccaaaattcctcacacggacggcaactttcacccttctccgctgatgggagggtttggaatgaagcacccgcctcctcagatcctcatcaaaaacacacctgtacctgcggatcctccaacggccttcaacaaggacaagctgaactctttcatcacccagtattctactggccaagtcagcgtggagatcgagtgggagctgcagaaggaaaacagcaagcgctggaacccggagatccagtacacttccaactattacaagtctaataatgttgaatttgctgttaatactgaaggtgtatatagtgaaccccgccccattggcaccagatacctgactcgtaatctg

SEQ ID NO: 197 - DNA, 2229 bp, Adeno-Associated Virus 9
  source 1..2229: mol_type = other DNA
atggctgccgatggttatcttccagattggctcgaggacaaccttagtgaaggaattcgcgagtggtgggctttgaaacctggagcccctcaacccaaggcaaatcaacaacatcaagacaacgctcgaggtcttgtgcttccgggttacaaataccttggacccggcaacggactcgacaagggggagccggtcaacgcagcagacgcggcggccctcgagcacgacaaggcctacgaccagcagctcaaggccggagacaacccgtacctcaagtacaaccacgccgacgccgagttccaggagcggctcaaagaagatacgtcttttgggggcaacctcgggcgagcagtcttccaggccaaaaagaggcttcttgaacctcttggtctggttgaggaagcggctaagacggctcctggaaagaagaggcctgtagagcagtctcctcaggaaccggactcctccgcgggtattggcaaatcgggtgcacagcccgctaaaaagagactcaatttcggtcagactggcgacacagagtcagtcccagaccctcaaccaatcggagaacctcccgcagccccctcaggtgtgggatctcttacaatggcttcaggtggtggcgcaccagtggcagacaataacgaaggtgccgatggagtgggtagttcctcgggaaattggcattgcgattcccaatggctgggggacagagtcatcaccaccagcacccgaacctgggccctgcccacctacaacaatcacctctacaagcaaatctccaacagcacatctggaggatcttcaaatgacaacgcctacttcggctacagcaccccctgggggtattttgacttcaacagattccactgccacttctcaccacgtgactggcagcgactcatcaacaacaactggggattccggcctaagcgactcaacttcaagctcttcaacattcaggtcaaagaggttacggacaacaatggagtcaagaccatcgccaataaccttaccagcacggtccaggtcttcacggactcagactatcagctcccgtacgtgctcgggtcggctcacgagggctgcctcccgccgttcccagcggacgttttcatgattcctcagtacgggtatctgacgcttaatgatggaagccaggccgtgggtcgttcgtccttttactgcctggaatatttcccgtcgcaaatgctaagaacgggtaacaacttccagttcagctacgagtttgagaacgtacctttccatagcagctacgctcacagccaaagcctggaccgactaatgaatccactcatcgaccaatacttgtactatctctctagaactattaacggttctggacagaatcaacaaacgctaaaattcagtgtggccggacccagcaacatggctgtccagggaagaaactacatacctggacccagctaccgacaacaacgtgtctcaaccactgtgactcaaaacaacaacagcgaatttgcttggcctggagcttcttcttgggctctcaatggacgtaatagcttgatgaatcctggacctgctatggccagccacaaagaaggagaggaccgtttctttcctttgtctggatctttaatttttggcaaacaaggtaccggcagagacaacgtggatgcggacaaagtcatgataaccaacgaagaagaaattaaaactactaacccggtagcaacggagtcctatggacaagtggccacaaaccaccagagtgcccagggaaacgacaccaggagcacagctcaggcacagaccggttgggttcaaaaccaaggaatacttccgggtatggtttggcaggacagagatgtgtacctgcaaggacccatttgggccaaaattcctcacacggacggcaactttcacccttctccgctgatgggagggtttggaatgaagcacccgcctcctcagatcctcatcaaaaacacacctgtacctgcggatcctccaacggccttcaacaaggacaagctgaactctttcatcacccagtattctactggccaagtcagcgtggagatcgagtgggagctgcagaaggaaaacagcaagcgctggaacccggagatccagtacacttccaactattacaagtctaataatgttgaatttgctgttaatactgaaggtgtatatagtgaaccccgccccattggcaccagatacctgactcgtaatctg

SEQ ID NO: 198 - DNA, 2229 bp, Adeno-Associated Virus 9
  source 1..2229: mol_type = other DNA
atggctgccgatggttatcttccagattggctcgaggacaaccttagtgaaggaattcgcgagtggtgggctttgaaacctggagcccctcaacccaaggcaaatcaacaacatcaagacaacgctcgaggtcttgtgcttccgggttacaaataccttggacccggcaacggactcgacaagggggagccggtcaacgcagcagacgcggcggccctcgagcacgacaaggcctacgaccagcagctcaaggccggagacaacccgtacctcaagtacaaccacgccgacgccgagttccaggagcggctcaaagaagatacgtcttttgggggcaacctcgggcgagcagtcttccaggccaaaaagaggcttcttgaacctcttggtctggttgaggaagcggctaagacggctcctggaaagaagaggcctgtagagcagtctcctcaggaaccggactcctccgcgggtattggcaaatcgggtgcacagcccgctaaaaagagactcaatttcggtcagactggcgacacagagtcagtcccagaccctcaaccaatcggagaacctcccgcagccccctcaggtgtgggatctcttacaatggcttcaggtggtggcgcaccagtggcagacaataacgaaggtgccgatggagtgggtagttcctcgggaaattggcattgcgattcccaatggctgggggacagagtcatcaccaccagcacccgaacctgggccctgcccacctacaacaatcacctctacaagcaaatctccaacagcacatctggaggatcttcaaatgacaacgcctacttcggctacagcaccccctgggggtattttgacttcaacagattccactgccacttctcaccacgtgactggcagcgactcatcaacaacaactggggattccggcctaagcgactcaacttcaagctcttcaacattcaggtcaaagaggttacggacaacaatggagtcaagaccatcgccaataaccttaccagcacggtccaggtcttcacggactcagactatcagctcccgtacgtgctcgggtcggctcacgagggctgcctcccgccgttcccagcggacgttttcatgattcctcagtacgggtatctgacgcttaatgatggaagccaggccgtgggtcgttcgtccttttactgcctggaatatttcccgtcgcaaatgctaagaacgggtaacaacttccagttcagctacgagtttgagaacgtacctttccatagcagctacgctcacagccaaagcctggaccgactaatgaatccactcatcgaccaatacttgtactatctctctagaactattaacggttctggacagaatcaacaaacgctaaaattcagtgtggccggacccagcaacatggctgtccagggaagaaactacatacctggacccagctaccgacaacaacgtgtctcaaccactgtgactcaaaacaacaacagcgaatttgcttggcctggagcttcttcttgggctctcaatggacgtaatagcttgatgaatcctggacctgctatggccagccacaaagaaggagaggaccgtttctttcctttgtctggatctttaatttttggcaaacaaggtaccggcagagacaacgtggatgcggacaaagtcatgataaccaacgaagaagaaattaaaactactaacccggtagcaacggagtcctatggacaagtggccacaaaccaccagagtgcgcaaggaaatgacactcgatcgacggcgcaagctcaaaccggttgggttcaaaaccaaggaatacttccgggtatggtttggcaggacagagatgtgtacctgcaaggacccatttgggccaaaattcctcacacggacggcaactttcacccttctccgctgatgggagggtttggaatgaagcacccgcctcctcagatcctcatcaaaaacacacctgtacctgcggatcctccaacggccttcaacaaggacaagctgaactctttcatcacccagtattctactggccaagtcagcgtggagatcgagtgggagctgcagaaggaaaacagcaagcgctggaacccggagatccagtacacttccaactattacaagtctaataatgttgaatttgctgttaatactgaaggtgtatatagtgaaccccgccccattggcaccagatacctgactcgtaatctg

SEQ ID NO: 199 - DNA, 2229 bp, Adeno-Associated Virus 9
  source 1..2229: mol_type = other DNA
atggctgccgatggttatcttccagattggctcgaggacaaccttagtgaaggaattcgcgagtggtgggctttgaaacctggagcccctcaacccaaggcaaatcaacaacatcaagacaacgctcgaggtcttgtgcttccgggttacaaataccttggacccggcaacggactcgacaagggggagccggtcaacgcagcagacgcggcggccctcgagcacgacaaggcctacgaccagcagctcaaggccggagacaacccgtacctcaagtacaaccacgccgacgccgagttccaggagcggctcaaagaagatacgtcttttgggggcaacctcgggcgagcagtcttccaggccaaaaagaggcttcttgaacctcttggtctggttgaggaagcggctaagacggctcctggaaagaagaggcctgtagagcagtctcctcaggaaccggactcctccgcgggtattggcaaatcgggtgcacagcccgctaaaaagagactcaatttcggtcagactggcgacacagagtcagtcccagaccctcaaccaatcggagaacctcccgcagccccctcaggtgtgggatctcttacaatggcttcaggtggtggcgcaccagtggcagacaataacgaaggtgccgatggagtgggtagttcctcgggaaattggcattgcgattcccaatggctgggggacagagtcatcaccaccagcacccgaacctgggccctgcccacctacaacaatcacctctacaagcaaatctccaacagcacatctggaggatcttcaaatgacaacgcctacttcggctacagcaccccctgggggtattttgacttcaacagattccactgccacttctcaccacgtgactggcagcgactcatcaacaacaactggggattccggcctaagcgactcaacttcaagctcttcaacattcaggtcaaagaggttacggacaacaatggagtcaagaccatcgccaataaccttaccagcacggtccaggtcttcacggactcagactatcagctcccgtacgtgctcgggtcggctcacgagggctgcctcccgccgttcccagcggacgttttcatgattcctcagtacgggtatctgacgcttaatgatggaagccaggccgtgggtcgttcgtccttttactgcctggaatatttcccgtcgcaaatgctaagaacgggtaacaacttccagttcagctacgagtttgagaacgtacctttccatagcagctacgctcacagccaaagcctggaccgactaatgaatccactcatcgaccaatacttgtactatctctctagaactattaacggttctggacagaatcaacaaacgctaaaattcagtgtggccggacccagcaacatggctgtccagggaagaaactacatacctggacccagctaccgacaacaacgtgtctcaaccactgtgactcaaaacaacaacagcgaatttgcttggcctggagcttcttcttgggctctcaatggacgtaatagcttgatgaatcctggacctgctatggccagccacaaagaaggagaggaccgtttctttcctttgtctggatctttaatttttggcaaacaaggtaccggcagagacaacgtggatgcggacaaagtcatgataaccaacgaagaagaaattaaaactactaacccggtagcaacggagtcctatggacaagtggccacaaaccaccagagtgcgcaagggaatgacaccagatcgactgcgcaggctcagaccggttgggttcaaaaccaaggaatacttccgggtatggtttggcaggacagagatgtgtacctgcaaggacccatttgggccaaaattcctcacacggacggcaactttcacccttctccgctgatgggagggtttggaatgaagcacccgcctcctcagatcctcatcaaaaacacacctgtacctgcggatcctccaacggccttcaacaaggacaagctgaactctttcatcacccagtattctactggccaagtcagcgtggagatcgagtgggagctgcagaaggaaaacagcaagcgctggaacccggagatccagtacacttccaactattacaagtctaataatgttgaatttgctgttaatactgaaggtgtatatagtgaaccccgccccattggcaccagatacctgactcgtaatctg

SEQ ID NO: 200 - DNA, 2229 bp, Adeno-Associated Virus 9
  source 1..2229: mol_type = other DNA
atggctgccgatggttatcttccagattggctcgaggacaaccttagtgaaggaattcgcgagtggtgggctttgaaacctggagcccctcaacccaaggcaaatcaacaacatcaagacaacgctcgaggtcttgtgcttccgggttacaaataccttggacccggcaacggactcgacaagggggagccggtcaacgcagcagacgcggcggccctcgagcacgacaaggcctacgaccagcagctcaaggccggagacaacccgtacctcaagtacaaccacgccgacgccgagttccaggagcggctcaaagaagatacgtcttttgggggcaacctcgggcgagcagtcttccaggccaaaaagaggcttcttgaacctcttggtctggttgaggaagcggctaagacggctcctggaaagaagaggcctgtagagcagtctcctcaggaaccggactcctccgcgggtattggcaaatcgggtgcacagcccgctaaaaagagactcaatttcggtcagactggcgacacagagtcagtcccagaccctcaaccaatcggagaacctcccgcagccccctcaggtgtgggatctcttacaatggcttcaggtggtggcgcaccagtggcagacaataacgaaggtgccgatggagtgggtagttcctcgggaaattggcattgcgattcccaatggctgggggacagagtcatcaccaccagcacccgaacctgggccctgcccacctacaacaatcacctctacaagcaaatctccaacagcacatctggaggatcttcaaatgacaacgcctacttcggctacagcaccccctgggggtattttgacttcaacagattccactgccacttctcaccacgtgactggcagcgactcatcaacaacaactggggattccggcctaagcgactcaacttcaagctcttcaacattcaggtcaaagaggttacggacaacaatggagtcaagaccatcgccaataaccttaccagcacggtccaggtcttcacggactcagactatcagctcccgtacgtgctcgggtcggctcacgagggctgcctcccgccgttcccagcggacgttttcatgattcctcagtacgggtatctgacgcttaatgatggaagccaggccgtgggtcgttcgtccttttactgcctggaatatttcccgtcgcaaatgctaagaacgggtaacaacttccagttcagctacgagtttgagaacgtacctttccatagcagctacgctcacagccaaagcctggaccgactaatgaatccactcatcgaccaatacttgtactatctctctagaactattaacggttctggacagaatcaacaaacgctaaaattcagtgtggccggacccagcaacatggctgtccagggaagaaactacatacctggacccagctaccgacaacaacgtgtctcaaccactgtgactcaaaacaacaacagcgaatttgcttggcctggagcttcttcttgggctctcaatggacgtaatagcttgatgaatcctggacctgctatggccagccacaaagaaggagaggaccgtttctttcctttgtctggatctttaatttttggcaaacaaggtaccggcagagacaacgtggatgcggacaaagtcatgataaccaacgaagaagaaattaaaactactaacccggtagcaacggagtcctatggacaagtggccacaaaccaccagagtgctcaaggtaatgacacacgctctacagcccaggctcaaaccggttgggttcaaaaccaaggaatacttccgggtatggtttggcaggacagagatgtgtacctgcaaggacccatttgggccaaaattcctcacacggacggcaactttcacccttctccgctgatgggagggtttggaatgaagcacccgcctcctcagatcctcatcaaaaacacacctgtacctgcggatcctccaacggccttcaacaaggacaagctgaactctttcatcacccagtattctactggccaagtcagcgtggagatcgagtgggagctgcagaaggaaaacagcaagcgctggaacccggagatccagtacacttccaactattacaagtctaataatgttgaatttgctgttaatactgaaggtgtatatagtgaaccccgccccattggcaccagatacctgactcgtaatctg

SEQ ID NO: 201 - DNA, 2229 bp, Adeno-Associated Virus 9
  source 1..2229: mol_type = other DNA
atggctgccgatggttatcttccagattggctcgaggacaaccttagtgaaggaattcgcgagtggtgggctttgaaacctggagcccctcaacccaaggcaaatcaacaacatcaagacaacgctcgaggtcttgtgcttccgggttacaaataccttggacccggcaacggactcgacaagggggagccggtcaacgcagcagacgcggcggccctcgagcacgacaaggcctacgaccagcagctcaaggccggagacaacccgtacctcaagtacaaccacgccgacgccgagttccaggagcggctcaaagaagatacgtcttttgggggcaacctcgggcgagcagtcttccaggccaaaaagaggcttcttgaacctcttggtctggttgaggaagcggctaagacggctcctggaaagaagaggcctgtagagcagtctcctcaggaaccggactcctccgcgggtattggcaaatcgggtgcacagcccgctaaaaagagactcaatttcggtcagactggcgacacagagtcagtcccagaccctcaaccaatcggagaacctcccgcagccccctcaggtgtgggatctcttacaatggcttcaggtggtggcgcaccagtggcagacaataacgaaggtgccgatggagtgggtagttcctcgggaaattggcattgcgattcccaatggctgggggacagagtcatcaccaccagcacccgaacctgggccctgcccacctacaacaatcacctctacaagcaaatctccaacagcacatctggaggatcttcaaatgacaacgcctacttcggctacagcaccccctgggggtattttgacttcaacagattccactgccacttctcaccacgtgactggcagcgactcatcaacaacaactggggattccggcctaagcgactcaacttcaagctcttcaacattcaggtcaaagaggttacggacaacaatggagtcaagaccatcgccaataaccttaccagcacggtccaggtcttcacggactcagactatcagctcccgtacgtgctcgggtcggctcacgagggctgcctcccgccgttcccagcggacgttttcatgattcctcagtacgggtatctgacgcttaatgatggaagccaggccgtgggtcgttcgtccttttactgcctggaatatttcccgtcgcaaatgctaagaacgggtaacaacttccagttcagctacgagtttgagaacgtacctttccatagcagctacgctcacagccaaagcctggaccgactaatgaatccactcatcgaccaatacttgtactatctctctagaactattaacggttctggacagaatcaacaaacgctaaaattcagtgtggccggacccagcaacatggctgtccagggaagaaactacatacctggacccagctaccgacaacaacgtgtctcaaccactgtgactcaaaacaacaacagcgaatttgcttggcctggagcttcttcttgggctctcaatggacgtaatagcttgatgaatcctggacctgctatggccagccacaaagaaggagaggaccgtttctttcctttgtctggatctttaatttttggcaaacaaggtaccggcagagacaacgtggatgcggacaaagtcatgataaccaacgaagaagaaattaaaactactaacccggtagcaacggagtcctatggacaagtggccacaaaccaccagagtgcccagatgaacagcacaatatctaaagcgcaggcacagaccggttgggttcaaaaccaaggaatacttccgggtatggtttggcaggacagagatgtgtacctgcaaggacccatttgggccaaaattcctcacacggacggcaactttcacccttctccgctgatgggagggtttggaatgaagcacccgcctcctcagatcctcatcaaaaacacacctgtacctgcggatcctccaacggccttcaacaaggacaagctgaactctttcatcacccagtattctactggccaagtcagcgtggagatcgagtgggagctgcagaaggaaaacagcaagcgctggaacccggagatccagtacacttccaactattacaagtctaataatgttgaatttgctgttaatactgaaggtgtatatagtgaaccccgccccattggcaccagatacctgactcgtaatctg

SEQ ID NO: 202 - DNA, 2229 bp, Adeno-Associated Virus 9
  source 1..2229: mol_type = other DNA
atggctgccgatggttatcttccagattggctcgaggacaaccttagtgaaggaattcgcgagtggtgggctttgaaacctggagcccctcaacccaaggcaaatcaacaacatcaagacaacgctcgaggtcttgtgcttccgggttacaaataccttggacccggcaacggactcgacaagggggagccggtcaacgcagcagacgcggcggccctcgagcacgacaaggcctacgaccagcagctcaaggccggagacaacccgtacctcaagtacaaccacgccgacgccgagttccaggagcggctcaaagaagatacgtcttttgggggcaacctcgggcgagcagtcttccaggccaaaaagaggcttcttgaacctcttggtctggttgaggaagcggctaagacggctcctggaaagaagaggcctgtagagcagtctcctcaggaaccggactcctccgcgggtattggcaaatcgggtgcacagcccgctaaaaagagactcaatttcggtcagactggcgacacagagtcagtcccagaccctcaaccaatcggagaacctcccgcagccccctcaggtgtgggatctcttacaatggcttcaggtggtggcgcaccagtggcagacaataacgaaggtgccgatggagtgggtagttcctcgggaaattggcattgcgattcccaatggctgggggacagagtcatcaccaccagcacccgaacctgggccctgcccacctacaacaatcacctctacaagcaaatctccaacagcacatctggaggatcttcaaatgacaacgcctacttcggctacagcaccccctgggggtattttgacttcaacagattccactgccacttctcaccacgtgactggcagcgactcatcaacaacaactggggattccggcctaagcgactcaacttcaagctcttcaacattcaggtcaaagaggttacggacaacaatggagtcaagaccatcgccaataaccttaccagcacggtccaggtcttcacggactcagactatcagctcccgtacgtgctcgggtcggctcacgagggctgcctcccgccgttcccagcggacgttttcatgattcctcagtacgggtatctgacgcttaatgatggaagccaggccgtgggtcgttcgtccttttactgcctggaatatttcccgtcgcaaatgctaagaacgggtaacaacttccagttcagctacgagtttgagaacgtacctttccatagcagctacgctcacagccaaagcctggaccgactaatgaatccactcatcgaccaatacttgtactatctctctagaactattaacggttctggacagaatcaacaaacgctaaaattcagtgtggccggacccagcaacatggctgtccagggaagaaactacatacctggacccagctaccgacaacaacgtgtctcaaccactgtgactcaaaacaacaacagcgaatttgcttggcctggagcttcttcttgggctctcaatggacgtaatagcttgatgaatcctggacctgctatggccagccacaaagaaggagaggaccgtttctttcctttgtctggatctttaatttttggcaaacaaggtaccggcagagacaacgtggatgcggacaaagtcatgataaccaacgaagaagaaattaaaactactaacccggtagcaacggagtcctatggacaagtggccacaaaccaccagagtgcacagatgaatagcaccatatcgaaagcacaagctcaaaccggttgggttcaaaaccaaggaatacttccgggtatggtttggcaggacagagatgtgtacctgcaaggacccatttgggccaaaattcctcacacggacggcaactttcacccttctccgctgatgggagggtttggaatgaagcacccgcctcctcagatcctcatcaaaaacacacctgtacctgcggatcctccaacggccttcaacaaggacaagctgaactctttcatcacccagtattctactggccaagtcagcgtggagatcgagtgggagctgcagaaggaaaacagcaagcgctggaacccggagatccagtacacttccaactattacaagtctaataatgttgaatttgctgttaatactgaaggtgtatatagtgaaccccgccccattggcaccagatacctgactcgtaatctg

SEQ ID NO: 203 - DNA, 2229 bp, Adeno-Associated Virus 9
  source 1..2229: mol_type = other DNA
atggctgccgatggttatcttccagattggctcgaggacaaccttagtgaaggaattcgcgagtggtgggctttgaaacctggagcccctcaacccaaggcaaatcaacaacatcaagacaacgctcgaggtcttgtgcttccgggttacaaataccttggacccggcaacggactcgacaagggggagccggtcaacgcagcagacgcggcggccctcgagcacgacaaggcctacgaccagcagctcaaggccggagacaacccgtacctcaagtacaaccacgccgacgccgagttccaggagcggctcaaagaagatacgtcttttgggggcaacctcgggcgagcagtcttccaggccaaaaagaggcttcttgaacctcttggtctggttgaggaagcggctaagacggctcctggaaagaagaggcctgtagagcagtctcctcaggaaccggactcctccgcgggtattggcaaatcgggtgcacagcccgctaaaaagagactcaatttcggtcagactggcgacacagagtcagtcccagaccctcaaccaatcggagaacctcccgcagccccctcaggtgtgggatctcttacaatggcttcaggtggtggcgcaccagtggcagacaataacgaaggtgccgatggagtgggtagttcctcgggaaattggcattgcgattcccaatggctgggggacagagtcatcaccaccagcacccgaacctgggccctgcccacctacaacaatcacctctacaagcaaatctccaacagcacatctggaggatcttcaaatgacaacgcctacttcggctacagcaccccctgggggtattttgacttcaacagattccactgccacttctcaccacgtgactggcagcgactcatcaacaacaactggggattccggcctaagcgactcaacttcaagctcttcaacattcaggtcaaagaggttacggacaacaatggagtcaagaccatcgccaataaccttaccagcacggtccaggtcttcacggactcagactatcagctcccgtacgtgctcgggtcggctcacgagggctgcctcccgccgttcccagcggacgttttcatgattcctcagtacgggtatctgacgcttaatgatggaagccaggccgtgggtcgttcgtccttttactgcctggaatatttcccgtcgcaaatgctaagaacgggtaacaacttccagttcagctacgagtttgagaacgtacctttccatagcagctacgctcacagccaaagcctggaccgactaatgaatccactcatcgaccaatacttgtactatctctctagaactattaacggttctggacagaatcaacaaacgctaaaattcagtgtggccggacccagcaacatggctgtccagggaagaaactacatacctggacccagctaccgacaacaacgtgtctcaaccactgtgactcaaaacaacaacagcgaatttgcttggcctggagcttcttcttgggctctcaatggacgtaatagcttgatgaatcctggacctgctatggccagccacaaagaaggagaggaccgtttctttcctttgtctggatctttaatttttggcaaacaaggtaccggcagagacaacgtggatgcggacaaagtcatgataaccaacgaagaagaaattaaaactactaacccggtagcaacggagtcctatggacaagtggccacaaaccaccagagtgctcaaatgaactcaacaatttcaaaggcgcaagcacagaccggttgggttcaaaaccaaggaatacttccgggtatggtttggcaggacagagatgtgtacctgcaaggacccatttgggccaaaattcctcacacggacggcaactttcacccttctccgctgatgggagggtttggaatgaagcacccgcctcctcagatcctcatcaaaaacacacctgtacctgcggatcctccaacggccttcaacaaggacaagctgaactctttcatcacccagtattctactggccaagtcagcgtggagatcgagtgggagctgcagaaggaaaacagcaagcgctggaacccggagatccagtacacttccaactattacaagtctaataatgttgaatttgctgttaatactgaaggtgtatatagtgaaccccgccccattggcaccagatacctgactcgtaatctg

SEQ ID NO: 204 - DNA, 2229 bp, Adeno-Associated Virus 9
  source 1..2229: mol_type = other DNA
atggctgccgatggttatcttccagattggctcgaggacaaccttagtgaaggaattcgcgagtggtgggctttgaaacctggagcccctcaacccaaggcaaatcaacaacatcaagacaacgctcgaggtcttgtgcttccgggttacaaataccttggacccggcaacggactcgacaagggggagccggtcaacgcagcagacgcggcggccctcgagcacgacaaggcctacgaccagcagctcaaggccggagacaacccgtacctcaagtacaaccacgccgacgccgagttccaggagcggctcaaagaagatacgtcttttgggggcaacctcgggcgagcagtcttccaggccaaaaagaggcttcttgaacctcttggtctggttgaggaagcggctaagacggctcctggaaagaagaggcctgtagagcagtctcctcaggaaccggactcctccgcgggtattggcaaatcgggtgcacagcccgctaaaaagagactcaatttcggtcagactggcgacacagagtcagtcccagaccctcaaccaatcggagaacctcccgcagccccctcaggtgtgggatctcttacaatggcttcaggtggtggcgcaccagtggcagacaataacgaaggtgccgatggagtgggtagttcctcgggaaattggcattgcgattcccaatggctgggggacagagtcatcaccaccagcacccgaacctgggccctgcccacctacaacaatcacctctacaagcaaatctccaacagcacatctggaggatcttcaaatgacaacgcctacttcggctacagcaccccctgggggtattttgacttcaacagattccactgccacttctcaccacgtgactggcagcgactcatcaacaacaactggggattccggcctaagcgactcaacttcaagctcttcaacattcaggtcaaagaggttacggacaacaatggagtcaagaccatcgccaataaccttaccagcacggtccaggtcttcacggactcagactatcagctcccgtacgtgctcgggtcggctcacgagggctgcctcccgccgttcccagcggacgttttcatgattcctcagtacgggtatctgacgcttaatgatggaagccaggccgtgggtcgttcgtccttttactgcctggaatatttcccgtcgcaaatgctaagaacgggtaacaacttccagttcagctacgagtttgagaacgtacctttccatagcagctacgctcacagccaaagcctggaccgactaatgaatccactcatcgaccaatacttgtactatctctctagaactattaacggttctggacagaatcaacaaacgctaaaattcagtgtggccggacccagcaacatggctgtccagggaagaaactacatacctggacccagctaccgacaacaacgtgtctcaaccactgtgactcaaaacaacaacagcgaatttgcttggcctggagcttcttcttgggctctcaatggacgtaatagcttgatgaatcctggacctgctatggccagccacaaagaaggagaggaccgtttctttcctttgtctggatctttaatttttggcaaacaaggtaccggcagagacaacgtggatgcggacaaagtcatgataaccaacgaagaagaaattaaaactactaacccggtagcaacggagtcctatggacaagtggccacaaaccaccagagtgcacagatgaatagtaccatatcgaaagcccaggctcaaaccggttgggttcaaaaccaaggaatacttccgggtatggtttggcaggacagagatgtgtacctgcaaggacccatttgggccaaaattcctcacacggacggcaactttcacccttctccgctgatgggagggtttggaatgaagcacccgcctcctcagatcctcatcaaaaacacacctgtacctgcggatcctccaacggccttcaacaaggacaagctgaactctttcatcacccagtattctactggccaagtcagcgtggagatcgagtgggagctgcagaaggaaaacagcaagcgctggaacccggagatccagtacacttccaactattacaagtctaataatgttgaatttgctgttaatactgaaggtgtatatagtgaaccccgccccattggcaccagatacctgactcgtaatctg

SEQ ID NO: 205 - DNA, 2229 bp, Adeno-Associated Virus 9
  source 1..2229: mol_type = other DNA
atggctgccgatggttatcttccagattggctcgaggacaaccttagtgaaggaattcgcgagtggtgggctttgaaacctggagcccctcaacccaaggcaaatcaacaacatcaagacaacgctcgaggtcttgtgcttccgggttacaaataccttggacccggcaacggactcgacaagggggagccggtcaacgcagcagacgcggcggccctcgagcacgacaaggcctacgaccagcagctcaaggccggagacaacccgtacctcaagtacaaccacgccgacgccgagttccaggagcggctcaaagaagatacgtcttttgggggcaacctcgggcgagcagtcttccaggccaaaaagaggcttcttgaacctcttggtctggttgaggaagcggctaagacggctcctggaaagaagaggcctgtagagcagtctcctcaggaaccggactcctccgcgggtattggcaaatcgggtgcacagcccgctaaaaagagactcaatttcggtcagactggcgacacagagtcagtcccagaccctcaaccaatcggagaacctcccgcagccccctcaggtgtgggatctcttacaatggcttcaggtggtggcgcaccagtggcagacaataacgaaggtgccgatggagtgggtagttcctcgggaaattggcattgcgattcccaatggctgggggacagagtcatcaccaccagcacccgaacctgggccctgcccacctacaacaatcacctctacaagcaaatctccaacagcacatctggaggatcttcaaatgacaacgcctacttcggctacagcaccccctgggggtattttgacttcaacagattccactgccacttctcaccacgtgactggcagcgactcatcaacaacaactggggattccggcctaagcgactcaacttcaagctcttcaacattcaggtcaaagaggttacggacaacaatggagtcaagaccatcgccaataaccttaccagcacggtccaggtcttcacggactcagactatcagctcccgtacgtgctcgggtcggctcacgagggctgcctcccgccgttcccagcggacgttttcatgattcctcagtacgggtatctgacgcttaatgatggaagccaggccgtgggtcgttcgtccttttactgcctggaatatttcccgtcgcaaatgctaagaacgggtaacaacttccagttcagctacgagtttgagaacgtacctttccatagcagctacgctcacagccaaagcctggaccgactaatgaatccactcatcgaccaatacttgtactatctctctagaactattaacggttctggacagaatcaacaaacgctaaaattcagtgtggccggacccagcaacatggctgtccagggaagaaactacatacctggacccagctaccgacaacaacgtgtctcaaccactgtgactcaaaacaacaacagcgaatttgcttggcctggagcttcttcttgggctctcaatggacgtaatagcttgatgaatcctggacctgctatggccagccacaaagaaggagaggaccgtttctttcctttgtctggatctttaatttttggcaaacaaggtaccggcagagacaacgtggatgcggacaaagtcatgataaccaacgaagaagaaattaaaactactaacccggtagcaacggagtcctatggacaagtggccacaaaccaccagagtgcgcaaatgaatagtacgatcagtaaggctcaagcgcaaaccggttgggttcaaaaccaaggaatacttccgggtatggtttggcaggacagagatgtgtacctgcaaggacccatttgggccaaaattcctcacacggacggcaactttcacccttctccgctgatgggagggtttggaatgaagcacccgcctcctcagatcctcatcaaaaacacacctgtacctgcggatcctccaacggccttcaacaaggacaagctgaactctttcatcacccagtattctactggccaagtcagcgtggagatcgagtgggagctgcagaaggaaaacagcaagcgctggaacccggagatccagtacacttccaactattacaagtctaataatgttgaatttgctgttaatactgaaggtgtatatagtgaaccccgccccattggcaccagatacctgactcgtaatctg

SEQ ID NO: 206 - DNA, 2229 bp, Adeno-Associated Virus 9
  source 1..2229: mol_type = other DNA
atggctgccgatggttatcttccagattggctcgaggacaaccttagtgaaggaattcgcgagtggtgggctttgaaacctggagcccctcaacccaaggcaaatcaacaacatcaagacaacgctcgaggtcttgtgcttccgggttacaaataccttggacccggcaacggactcgacaagggggagccggtcaacgcagcagacgcggcggccctcgagcacgacaaggcctacgaccagcagctcaaggccggagacaacccgtacctcaagtacaaccacgccgacgccgagttccaggagcggctcaaagaagatacgtcttttgggggcaacctcgggcgagcagtcttccaggccaaaaagaggcttcttgaacctcttggtctggttgaggaagcggctaagacggctcctggaaagaagaggcctgtagagcagtctcctcaggaaccggactcctccgcgggtattggcaaatcgggtgcacagcccgctaaaaagagactcaatttcggtcagactggcgacacagagtcagtcccagaccctcaaccaatcggagaacctcccgcagccccctcaggtgtgggatctcttacaatggcttcaggtggtggcgcaccagtggcagacaataacgaaggtgccgatggagtgggtagttcctcgggaaattggcattgcgattcccaatggctgggggacagagtcatcaccaccagcacccgaacctgggccctgcccacctacaacaatcacctctacaagcaaatctccaacagcacatctggaggatcttcaaatgacaacgcctacttcggctacagcaccccctgggggtattttgacttcaacagattccactgccacttctcaccacgtgactggcagcgactcatcaacaacaactggggattccggcctaagcgactcaacttcaagctcttcaacattcaggtcaaagaggttacggacaacaatggagtcaagaccatcgccaataaccttaccagcacggtccaggtcttcacggactcagactatcagctcccgtacgtgctcgggtcggctcacgagggctgcctcccgccgttcccagcggacgttttcatgattcctcagtacgggtatctgacgcttaatgatggaagccaggccgtgggtcgttcgtccttttactgcctggaatatttcccgtcgcaaatgctaagaacgggtaacaacttccagttcagctacgagtttgagaacgtacctttccatagcagctacgctcacagccaaagcctggaccgactaatgaatccactcatcgaccaatacttgtactatctctctagaactattaacggttctggacagaatcaacaaacgctaaaattcagtgtggccggacccagcaacatggctgtccagggaagaaactacatacctggacccagctaccgacaacaacgtgtctcaaccactgtgactcaaaacaacaacagcgaatttgcttggcctggagcttcttcttgggctctcaatggacgtaatagcttgatgaatcctggacctgctatggccagccacaaagaaggagaggaccgtttctttcctttgtctggatctttaatttttggcaaacaaggtaccggcagagacaacgtggatgcggacaaagtcatgataaccaacgaagaagaaattaaaactactaacccggtagcaacggagtcctatggacaagtggccacaaaccaccagagtgctcagatgaattctacgatatcgaaggcacaggcacagaccggttgggttcaaaaccaaggaatacttccgggtatggtttggcaggacagagatgtgtacctgcaaggacccatttgggccaaaattcctcacacggacggcaactttcacccttctccgctgatgggagggtttggaatgaagcacccgcctcctcagatcctcatcaaaaacacacctgtacctgcggatcctccaacggccttcaacaaggacaagctgaactctttcatcacccagtattctactggccaagtcagcgtggagatcgagtgggagctgcagaaggaaaacagcaagcgctggaacccggagatccagtacacttccaactattacaagtctaataatgttgaatttgctgttaatactgaaggtgtatatagtgaaccccgccccattggcaccagatacctgactcgtaatctg

SEQ ID NO: 207 - DNA, 2229 bp, Adeno-Associated Virus 9
  source 1..2229: mol_type = other DNA
atggctgccgatggttatcttccagattggctcgaggacaaccttagtgaaggaattcgcgagtggtgggctttgaaacctggagcccctcaacccaaggcaaatcaacaacatcaagacaacgctcgaggtcttgtgcttccgggttacaaataccttggacccggcaacggactcgacaagggggagccggtcaacgcagcagacgcggcggccctcgagcacgacaaggcctacgaccagcagctcaaggccggagacaacccgtacctcaagtacaaccacgccgacgccgagttccaggagcggctcaaagaagatacgtcttttgggggcaacctcgggcgagcagtcttccaggccaaaaagaggcttcttgaacctcttggtctggttgaggaagcggctaagacggctcctggaaagaagaggcctgtagagcagtctcctcaggaaccggactcctccgcgggtattggcaaatcgggtgcacagcccgctaaaaagagactcaatttcggtcagactggcgacacagagtcagtcccagaccctcaaccaatcggagaacctcccgcagccccctcaggtgtgggatctcttacaatggcttcaggtggtggcgcaccagtggcagacaataacgaaggtgccgatggagtgggtagttcctcgggaaattggcattgcgattcccaatggctgggggacagagtcatcaccaccagcacccgaacctgggccctgcccacctacaacaatcacctctacaagcaaatctccaacagcacatctggaggatcttcaaatgacaacgcctacttcggctacagcaccccctgggggtattttgacttcaacagattccactgccacttctcaccacgtgactggcagcgactcatcaacaacaactggggattccggcctaagcgactcaacttcaagctcttcaacattcaggtcaaagaggttacggacaacaatggagtcaagaccatcgccaataaccttaccagcacggtccaggtcttcacggactcagactatcagctcccgtacgtgctcgggtcggctcacgagggctgcctcccgccgttcccagcggacgttttcatgattcctcagtacgggtatctgacgcttaatgatggaagccaggccgtgggtcgttcgtccttttactgcctggaatatttcccgtcgcaaatgctaagaacgggtaacaacttccagttcagctacgagtttgagaacgtacctttccatagcagctacgctcacagccaaagcctggaccgactaatgaatccactcatcgaccaatacttgtactatctctctagaactattaacggttctggacagaatcaacaaacgctaaaattcagtgtggccggacccagcaacatggctgtccagggaagaaactacatacctggacccagctaccgacaacaacgtgtctcaaccactgtgactcaaaacaacaacagcgaatttgcttggcctggagcttcttcttgggctctcaatggacgtaatagcttgatgaatcctggacctgctatggccagccacaaagaaggagaggaccgtttctttcctttgtctggatctttaatttttggcaaacaaggtaccggcagagacaacgtggatgcggacaaagtcatgataaccaacgaagaagaaattaaaactactaacccggtagcaacggagtcctatggacaagtggccacaaaccaccagagtgctcaaatgaactcgacgatctcgaaggcgcaagcccagaccggttgggttcaaaaccaaggaatacttccgggtatggtttggcaggacagagatgtgtacctgcaaggacccatttgggccaaaattcctcacacggacggcaactttcacccttctccgctgatgggagggtttggaatgaagcacccgcctcctcagatcctcatcaaaaacacacctgtacctgcggatcctccaacggccttcaacaaggacaagctgaactctttcatcacccagtattctactggccaagtcagcgtggagatcgagtgggagctgcagaaggaaaacagcaagcgctggaacccggagatccagtacacttccaactattacaagtctaataatgttgaatttgctgttaatactgaaggtgtatatagtgaaccccgccccattggcaccagatacctgactcgtaatctg

SEQ ID NO: 208 - DNA, 2229 bp, Adeno-Associated Virus 9
  source 1..2229: mol_type = other DNA
atggctgccgatggttatcttccagattggctcgaggacaaccttagtgaaggaattcgcgagtggtgggctttgaaacctggagcccctcaacccaaggcaaatcaacaacatcaagacaacgctcgaggtcttgtgcttccgggttacaaataccttggacccggcaacggactcgacaagggggagccggtcaacgcagcagacgcggcggccctcgagcacgacaaggcctacgaccagcagctcaaggccggagacaacccgtacctcaagtacaaccacgccgacgccgagttccaggagcggctcaaagaagatacgtcttttgggggcaacctcgggcgagcagtcttccaggccaaaaagaggcttcttgaacctcttggtctggttgaggaagcggctaagacggctcctggaaagaagaggcctgtagagcagtctcctcaggaaccggactcctccgcgggtattggcaaatcgggtgcacagcccgctaaaaagagactcaatttcggtcagactggcgacacagagtcagtcccagaccctcaaccaatcggagaacctcccgcagccccctcaggtgtgggatctcttacaatggcttcaggtggtggcgcaccagtggcagacaataacgaaggtgccgatggagtgggtagttcctcgggaaattggcattgcgattcccaatggctgggggacagagtcatcaccaccagcacccgaacctgggccctgcccacctacaacaatcacctctacaagcaaatctccaacagcacatctggaggatcttcaaatgacaacgcctacttcggctacagcaccccctgggggtattttgacttcaacagattccactgccacttctcaccacgtgactggcagcgactcatcaacaacaactggggattccggcctaagcgactcaacttcaagctcttcaacattcaggtcaaagaggttacggacaacaatggagtcaagaccatcgccaataaccttaccagcacggtccaggtcttcacggactcagactatcagctcccgtacgtgctcgggtcggctcacgagggctgcctcccgccgttcccagcggacgttttcatgattcctcagtacgggtatctgacgcttaatgatggaagccaggccgtgggtcgttcgtccttttactgcctggaatatttcccgtcgcaaatgctaagaacgggtaacaacttccagttcagctacgagtttgagaacgtacctttccatagcagctacgctcacagccaaagcctggaccgactaatgaatccactcatcgaccaatacttgtactatctctctagaactattaacggttctggacagaatcaacaaacgctaaaattcagtgtggccggacccagcaacatggctgtccagggaagaaactacatacctggacccagctaccgacaacaacgtgtctcaaccactgtgactcaaaacaacaacagcgaatttgcttggcctggagcttcttcttgggctctcaatggacgtaatagcttgatgaatcctggacctgctatggccagccacaaagaaggagaggaccgtttctttcctttgtctggatctttaatttttggcaaacaaggtaccggcagagacaacgtggatgcggacaaagtcatgataaccaacgaagaagaaattaaaactactaacccggtagcaacggagtcctatggacaagtggccacaaaccaccagagtgcccaaatgaactcaacaatctccaaggctcaggcgcagaccggttgggttcaaaaccaaggaatacttccgggtatggtttggcaggacagagatgtgtacctgcaaggacccatttgggccaaaattcctcacacggacggcaactttcacccttctccgctgatgggagggtttggaatgaagcacccgcctcctcagatcctcatcaaaaacacacctgtacctgcggatcctccaacggccttcaacaaggacaagctgaactctttcatcacccagtattctactggccaagtcagcgtggagatcgagtgggagctgcagaaggaaaacagcaagcgctggaacccggagatccagtacacttccaactattacaagtctaataatgttgaatttgctgttaatactgaaggtgtatatagtgaaccccgccccattggcaccagatacctgactcgtaatctg

SEQ ID NO: 209 - DNA, 2229 bp, Adeno-Associated Virus 9
  source 1..2229: mol_type = other DNA
atggctgccgatggttatcttccagattggctcgaggacaaccttagtgaaggaattcgcgagtggtgggctttgaaacctggagcccctcaacccaaggcaaatcaacaacatcaagacaacgctcgaggtcttgtgcttccgggttacaaataccttggacccggcaacggactcgacaagggggagccggtcaacgcagcagacgcggcggccctcgagcacgacaaggcctacgaccagcagctcaaggccggagacaacccgtacctcaagtacaaccacgccgacgccgagttccaggagcggctcaaagaagatacgtcttttgggggcaacctcgggcgagcagtcttccaggccaaaaagaggcttcttgaacctcttggtctggttgaggaagcggctaagacggctcctggaaagaagaggcctgtagagcagtctcctcaggaaccggactcctccgcgggtattggcaaatcgggtgcacagcccgctaaaaagagactcaatttcggtcagactggcgacacagagtcagtcccagaccctcaaccaatcggagaacctcccgcagccccctcaggtgtgggatctcttacaatggcttcaggtggtggcgcaccagtggcagacaataacgaaggtgccgatggagtgggtagttcctcgggaaattggcattgcgattcccaatggctgggggacagagtcatcaccaccagcacccgaacctgggccctgcccacctacaacaatcacctctacaagcaaatctccaacagcacatctggaggatcttcaaatgacaacgcctacttcggctacagcaccccctgggggtattttgacttcaacagattccactgccacttctcaccacgtgactggcagcgactcatcaacaacaactggggattccggcctaagcgactcaacttcaagctcttcaacattcaggtcaaagaggttacggacaacaatggagtcaagaccatcgccaataaccttaccagcacggtccaggtcttcacggactcagactatcagctcccgtacgtgctcgggtcggctcacgagggctgcctcccgccgttcccagcggacgttttcatgattcctcagtacgggtatctgacgcttaatgatggaagccaggccgtgggtcgttcgtccttttactgcctggaatatttcccgtcgcaaatgctaagaacgggtaacaacttccagttcagctacgagtttgagaacgtacctttccatagcagctacgctcacagccaaagcctggaccgactaatgaatccactcatcgaccaatacttgtactatctctctagaactattaacggttctggacagaatcaacaaacgctaaaattcagtgtggccggacccagcaacatggctgtccagggaagaaactacatacctggacccagctaccgacaacaacgtgtctcaaccactgtgactcaaaacaacaacagcgaatttgcttggcctggagcttcttcttgggctctcaatggacgtaatagcttgatgaatcctggacctgctatggccagccacaaagaaggagaggaccgtttctttcctttgtctggatctttaatttttggcaaacaaggtaccggcagagacaacgtggatgcggacaaagtcatgataaccaacgaagaagaaattaaaactactaacccggtagcaacggagtcctatggacaagtggccacaaaccaccagagtgcccaaatgaacagcacaatttcaaaagcgcaagcgcaaaccggttgggttcaaaaccaaggaatacttccgggtatggtttggcaggacagagatgtgtacctgcaaggacccatttgggccaaaattcctcacacggacggcaactttcacccttctccgctgatgggagggtttggaatgaagcacccgcctcctcagatcctcatcaaaaacacacctgtacctgcggatcctccaacggccttcaacaaggacaagctgaactctttcatcacccagtattctactggccaagtcagcgtggagatcgagtgggagctgcagaaggaaaacagcaagcgctggaacccggagatccagtacacttccaactattacaagtctaataatgttgaatttgctgttaatactgaaggtgtatatagtgaaccccgccccattggcaccagatacctgactcgtaatctg

SEQ ID NO: 210 - DNA, 2229 bp, Adeno-Associated Virus 9
  source 1..2229: mol_type = other DNA
atggctgccgatggttatcttccagattggctcgaggacaaccttagtgaaggaattcgcgagtggtgggctttgaaacctggagcccctcaacccaaggcaaatcaacaacatcaagacaacgctcgaggtcttgtgcttccgggttacaaataccttggacccggcaacggactcgacaagggggagccggtcaacgcagcagacgcggcggccctcgagcacgacaaggcctacgaccagcagctcaaggccggagacaacccgtacctcaagtacaaccacgccgacgccgagttccaggagcggctcaaagaagatacgtcttttgggggcaacctcgggcgagcagtcttccaggccaaaaagaggcttcttgaacctcttggtctggttgaggaagcggctaagacggctcctggaaagaagaggcctgtagagcagtctcctcaggaaccggactcctccgcgggtattggcaaatcgggtgcacagcccgctaaaaagagactcaatttcggtcagactggcgacacagagtcagtcccagaccctcaaccaatcggagaacctcccgcagccccctcaggtgtgggatctcttacaatggcttcaggtggtggcgcaccagtggcagacaataacgaaggtgccgatggagtgggtagttcctcgggaaattggcattgcgattcccaatggctgggggacagagtcatcaccaccagcacccgaacctgggccctgcccacctacaacaatcacctctacaagcaaatctccaacagcacatctggaggatcttcaaatgacaacgcctacttcggctacagcaccccctgggggtattttgacttcaacagattccactgccacttctcaccacgtgactggcagcgactcatcaacaacaactggggattccggcctaagcgactcaacttcaagctcttcaacattcaggtcaaagaggttacggacaacaatggagtcaagaccatcgccaataaccttaccagcacggtccaggtcttcacggactcagactatcagctcccgtacgtgctcgggtcggctcacgagggctgcctcccgccgttcccagcggacgttttcatgattcctcagtacgggtatctgacgcttaatgatggaagccaggccgtgggtcgttcgtccttttactgcctggaatatttcccgtcgcaaatgctaagaacgggtaacaacttccagttcagctacgagtttgagaacgtacctttccatagcagctacgctcacagccaaagcctggaccgactaatgaatccactcatcgaccaatacttgtactatctctctagaactattaacggttctggacagaatcaacaaacgctaaaattcagtgtggccggacccagcaacatggctgtccagggaagaaactacatacctggacccagctaccgacaacaacgtgtctcaaccactgtgactcaaaacaacaacagcgaatttgcttggcctggagcttcttcttgggctctcaatggacgtaatagcttgatgaatcctggacctgctatggccagccacaaagaaggagaggaccgtttctttcctttgtctggatctttaatttttggcaaacaaggtaccggcagagacaacgtggatgcggacaaagtcatgataaccaacgaagaagaaattaaaactactaacccggtagcaacggagtcctatggacaagtggccacaaaccaccagagtgcccagatgaattcaactattagtaaagctcaggcgcaaaccggttgggttcaaaaccaaggaatacttccgggtatggtttggcaggacagagatgtgtacctgcaaggacccatttgggccaaaattcctcacacggacggcaactttcacccttctccgctgatgggagggtttggaatgaagcacccgcctcctcagatcctcatcaaaaacacacctgtacctgcggatcctccaacggccttcaacaaggacaagctgaactctttcatcacccagtattctactggccaagtcagcgtggagatcgagtgggagctgcagaaggaaaacagcaagcgctggaacccggagatccagtacacttccaactattacaagtctaataatgttgaatttgctgttaatactgaaggtgtatatagtgaaccccgccccattggcaccagatacctgactcgtaatctg

SEQ ID NO: 211 - DNA, 2229 bp, Adeno-Associated Virus 9
  source 1..2229: mol_type = other DNA
atggctgccgatggttatcttccagattggctcgaggacaaccttagtgaaggaattcgcgagtggtgggctttgaaacctggagcccctcaacccaaggcaaatcaacaacatcaagacaacgctcgaggtcttgtgcttccgggttacaaataccttggacccggcaacggactcgacaagggggagccggtcaacgcagcagacgcggcggccctcgagcacgacaaggcctacgaccagcagctcaaggccggagacaacccgtacctcaagtacaaccacgccgacgccgagttccaggagcggctcaaagaagatacgtcttttgggggcaacctcgggcgagcagtcttccaggccaaaaagaggcttcttgaacctcttggtctggttgaggaagcggctaagacggctcctggaaagaagaggcctgtagagcagtctcctcaggaaccggactcctccgcgggtattggcaaatcgggtgcacagcccgctaaaaagagactcaatttcggtcagactggcgacacagagtcagtcccagaccctcaaccaatcggagaacctcccgcagccccctcaggtgtgggatctcttacaatggcttcaggtggtggcgcaccagtggcagacaataacgaaggtgccgatggagtgggtagttcctcgggaaattggcattgcgattcccaatggctgggggacagagtcatcaccaccagcacccgaacctgggccctgcccacctacaacaatcacctctacaagcaaatctccaacagcacatctggaggatcttcaaatgacaacgcctacttcggctacagcaccccctgggggtattttgacttcaacagattccactgccacttctcaccacgtgactggcagcgactcatcaacaacaactggggattccggcctaagcgactcaacttcaagctcttcaacattcaggtcaaagaggttacggacaacaatggagtcaagaccatcgccaataaccttaccagcacggtccaggtcttcacggactcagactatcagctcccgtacgtgctcgggtcggctcacgagggctgcctcccgccgttcccagcggacgttttcatgattcctcagtacgggtatctgacgcttaatgatggaagccaggccgtgggtcgttcgtccttttactgcctggaatatttcccgtcgcaaatgctaagaacgggtaacaacttccagttcagctacgagtttgagaacgtacctttccatagcagctacgctcacagccaaagcctggaccgactaatgaatccactcatcgaccaatacttgtactatctctctagaactattaacggttctggacagaatcaacaaacgctaaaattcagtgtggccggacccagcaacatggctgtccagggaagaaactacatacctggacccagctaccgacaacaacgtgtctcaaccactgtgactcaaaacaacaacagcgaatttgcttggcctggagcttcttcttgggctctcaatggacgtaatagcttgatgaatcctggacctgctatggccagccacaaagaaggagaggaccgtttctttcctttgtctggatctttaatttttggcaaacaaggtaccggcagagacaacgtggatgcggacaaagtcatgataaccaacgaagaagaaattaaaactactaacccggtagcaacggagtcctatggacaagtggccacaaaccaccagagtgcacaaaacgggaaggcagaccctcgggctcaagcacaaaccggttgggttcaaaaccaaggaatacttccgggtatggtttggcaggacagagatgtgtacctgcaaggacccatttgggccaaaattcctcacacggacggcaactttcacccttctccgctgatgggagggtttggaatgaagcacccgcctcctcagatcctcatcaaaaacacacctgtacctgcggatcctccaacggccttcaacaaggacaagctgaactctttcatcacccagtattctactggccaagtcagcgtggagatcgagtgggagctgcagaaggaaaacagcaagcgctggaacccggagatccagtacacttccaactattacaagtctaataatgttgaatttgctgttaatactgaaggtgtatatagtgaaccccgccccattggcaccagatacctgactcgtaatctg

SEQ ID NO: 212 - DNA, 2229 bp, Adeno-Associated Virus 9
  source 1..2229: mol_type = other DNA
atggctgccgatggttatcttccagattggctcgaggacaaccttagtgaaggaattcgcgagtggtgggctttgaaacctggagcccctcaacccaaggcaaatcaacaacatcaagacaacgctcgaggtcttgtgcttccgggttacaaataccttggacccggcaacggactcgacaagggggagccggtcaacgcagcagacgcggcggccctcgagcacgacaaggcctacgaccagcagctcaaggccggagacaacccgtacctcaagtacaaccacgccgacgccgagttccaggagcggctcaaagaagatacgtcttttgggggcaacctcgggcgagcagtcttccaggccaaaaagaggcttcttgaacctcttggtctggttgaggaagcggctaagacggctcctggaaagaagaggcctgtagagcagtctcctcaggaaccggactcctccgcgggtattggcaaatcgggtgcacagcccgctaaaaagagactcaatttcggtcagactggcgacacagagtcagtcccagaccctcaaccaatcggagaacctcccgcagccccctcaggtgtgggatctcttacaatggcttcaggtggtggcgcaccagtggcagacaataacgaaggtgccgatggagtgggtagttcctcgggaaattggcattgcgattcccaatggctgggggacagagtcatcaccaccagcacccgaacctgggccctgcccacctacaacaatcacctctacaagcaaatctccaacagcacatctggaggatcttcaaatgacaacgcctacttcggctacagcaccccctgggggtattttgacttcaacagattccactgccacttctcaccacgtgactggcagcgactcatcaacaacaactggggattccggcctaagcgactcaacttcaagctcttcaacattcaggtcaaagaggttacggacaacaatggagtcaagaccatcgccaataaccttaccagcacggtccaggtcttcacggactcagactatcagctcccgtacgtgctcgggtcggctcacgagggctgcctcccgccgttcccagcggacgttttcatgattcctcagtacgggtatctgacgcttaatgatggaagccaggccgtgggtcgttcgtccttttactgcctggaatatttcccgtcgcaaatgctaagaacgggtaacaacttccagttcagctacgagtttgagaacgtacctttccatagcagctacgctcacagccaaagcctggaccgactaatgaatccactcatcgaccaatacttgtactatctctctagaactattaacggttctggacagaatcaacaaacgctaaaattcagtgtggccggacccagcaacatggctgtccagggaagaaactacatacctggacccagctaccgacaacaacgtgtctcaaccactgtgactcaaaacaacaacagcgaatttgcttggcctggagcttcttcttgggctctcaatggacgtaatagcttgatgaatcctggacctgctatggccagccacaaagaaggagaggaccgtttctttcctttgtctggatctttaatttttggcaaacaaggtaccggcagagacaacgtggatgcggacaaagtcatgataaccaacgaagaagaaattaaaactactaacccggtagcaacggagtcctatggacaagtggccacaaaccaccagagtgcgcagaacggaaaggcagatccacgagctcaggcacaaaccggttgggttcaaaaccaaggaatacttccgggtatggtttggcaggacagagatgtgtacctgcaaggacccatttgggccaaaattcctcacacggacggcaactttcacccttctccgctgatgggagggtttggaatgaagcacccgcctcctcagatcctcatcaaaaacacacctgtacctgcggatcctccaacggccttcaacaaggacaagctgaactctttcatcacccagtattctactggccaagtcagcgtggagatcgagtgggagctgcagaaggaaaacagcaagcgctggaacccggagatccagtacacttccaactattacaagtctaataatgttgaatttgctgttaatactgaaggtgtatatagtgaaccccgccccattggcaccagatacctgactcgtaatctg

SEQ ID NO: 213 - DNA, 2229 bp, Adeno-Associated Virus 9
  source 1..2229: mol_type = other DNA
atggctgccgatggttatcttccagattggctcgaggacaaccttagtgaaggaattcgcgagtggtgggctttgaaacctggagcccctcaacccaaggcaaatcaacaacatcaagacaacgctcgaggtcttgtgcttccgggttacaaataccttggacccggcaacggactcgacaagggggagccggtcaacgcagcagacgcggcggccctcgagcacgacaaggcctacgaccagcagctcaaggccggagacaacccgtacctcaagtacaaccacgccgacgccgagttccaggagcggctcaaagaagatacgtcttttgggggcaacctcgggcgagcagtcttccaggccaaaaagaggcttcttgaacctcttggtctggttgaggaagcggctaagacggctcctggaaagaagaggcctgtagagcagtctcctcaggaaccggactcctccgcgggtattggcaaatcgggtgcacagcccgctaaaaagagactcaatttcggtcagactggcgacacagagtcagtcccagaccctcaaccaatcggagaacctcccgcagccccctcaggtgtgggatctcttacaatggcttcaggtggtggcgcaccagtggcagacaataacgaaggtgccgatggagtgggtagttcctcgggaaattggcattgcgattcccaatggctgggggacagagtcatcaccaccagcacccgaacctgggccctgcccacctacaacaatcacctctacaagcaaatctccaacagcacatctggaggatcttcaaatgacaacgcctacttcggctacagcaccccctgggggtattttgacttcaacagattccactgccacttctcaccacgtgactggcagcgactcatcaacaacaactggggattccggcctaagcgactcaacttcaagctcttcaacattcaggtcaaagaggttacggacaacaatggagtcaagaccatcgccaataaccttaccagcacggtccaggtcttcacggactcagactatcagctcccgtacgtgctcgggtcggctcacgagggctgcctcccgccgttcccagcggacgttttcatgattcctcagtacgggtatctgacgcttaatgatggaagccaggccgtgggtcgttcgtccttttactgcctggaatatttcccgtcgcaaatgctaagaacgggtaacaacttccagttcagctacgagtttgagaacgtacctttccatagcagctacgctcacagccaaagcctggaccgactaatgaatccactcatcgaccaatacttgtactatctctctagaactattaacggttctggacagaatcaacaaacgctaaaattcagtgtggccggacccagcaacatggctgtccagggaagaaactacatacctggacccagctaccgacaacaacgtgtctcaaccactgtgactcaaaacaacaacagcgaatttgcttggcctggagcttcttcttgggctctcaatggacgtaatagcttgatgaatcctggacctgctatggccagccacaaagaaggagaggaccgtttctttcctttgtctggatctttaatttttggcaaacaaggtaccggcagagacaacgtggatgcggacaaagtcatgataaccaacgaagaagaaattaaaactactaacccggtagcaacggagtcctatggacaagtggccacaaaccaccagagtgcgcagaatggcaaggcagacccgcgagcccaggcacagaccggttgggttcaaaaccaaggaatacttccgggtatggtttggcaggacagagatgtgtacctgcaaggacccatttgggccaaaattcctcacacggacggcaactttcacccttctccgctgatgggagggtttggaatgaagcacccgcctcctcagatcctcatcaaaaacacacctgtacctgcggatcctccaacggccttcaacaaggacaagctgaactctttcatcacccagtattctactggccaagtcagcgtggagatcgagtgggagctgcagaaggaaaacagcaagcgctggaacccggagatccagtacacttccaactattacaagtctaataatgttgaatttgctgttaatactgaaggtgtatatagtgaaccccgccccattggcaccagatacctgactcgtaatctg

SEQ ID NO: 214 - DNA, 2229 bp, Adeno-Associated Virus 9
  source 1..2229: mol_type = other DNA
atggctgccgatggttatcttccagattggctcgaggacaaccttagtgaaggaattcgcgagtggtgggctttgaaacctggagcccctcaacccaaggcaaatcaacaacatcaagacaacgctcgaggtcttgtgcttccgggttacaaataccttggacccggcaacggactcgacaagggggagccggtcaacgcagcagacgcggcggccctcgagcacgacaaggcctacgaccagcagctcaaggccggagacaacccgtacctcaagtacaaccacgccgacgccgagttccaggagcggctcaaagaagatacgtcttttgggggcaacctcgggcgagcagtcttccaggccaaaaagaggcttcttgaacctcttggtctggttgaggaagcggctaagacggctcctggaaagaagaggcctgtagagcagtctcctcaggaaccggactcctccgcgggtattggcaaatcgggtgcacagcccgctaaaaagagactcaatttcggtcagactggcgacacagagtcagtcccagaccctcaaccaatcggagaacctcccgcagccccctcaggtgtgggatctcttacaatggcttcaggtggtggcgcaccagtggcagacaataacgaaggtgccgatggagtgggtagttcctcgggaaattggcattgcgattcccaatggctgggggacagagtcatcaccaccagcacccgaacctgggccctgcccacctacaacaatcacctctacaagcaaatctccaacagcacatctggaggatcttcaaatgacaacgcctacttcggctacagcaccccctgggggtattttgacttcaacagattccactgccacttctcaccacgtgactggcagcgactcatcaacaacaactggggattccggcctaagcgactcaacttcaagctcttcaacattcaggtcaaagaggttacggacaacaatggagtcaagaccatcgccaataaccttaccagcacggtccaggtcttcacggactcagactatcagctcccgtacgtgctcgggtcggctcacgagggctgcctcccgccgttcccagcggacgttttcatgattcctcagtacgggtatctgacgcttaatgatggaagccaggccgtgggtcgttcgtccttttactgcctggaatatttcccgtcgcaaatgctaagaacgggtaacaacttccagttcagctacgagtttgagaacgtacctttccatagcagctacgctcacagccaaagcctggaccgactaatgaatccactcatcgaccaatacttgtactatctctctagaactattaacggttctggacagaatcaacaaacgctaaaattcagtgtggccggacccagcaacatggctgtccagggaagaaactacatacctggacccagctaccgacaacaacgtgtctcaaccactgtgactcaaaacaacaacagcgaatttgcttggcctggagcttcttcttgggctctcaatggacgtaatagcttgatgaatcctggacctgctatggccagccacaaagaaggagaggaccgtttctttcctttgtctggatctttaatttttggcaaacaaggtaccggcagagacaacgtggatgcggacaaagtcatgataaccaacgaagaagaaattaaaactactaacccggtagcaacggagtcctatggacaagtggccacaaaccaccagagtgcacagaatggaaaagcagacccacgtgcccaagcacaaaccggttgggttcaaaaccaaggaatacttccgggtatggtttggcaggacagagatgtgtacctgcaaggacccatttgggccaaaattcctcacacggacggcaactttcacccttctccgctgatgggagggtttggaatgaagcacccgcctcctcagatcctcatcaaaaacacacctgtacctgcggatcctccaacggccttcaacaaggacaagctgaactctttcatcacccagtattctactggccaagtcagcgtggagatcgagtgggagctgcagaaggaaaacagcaagcgctggaacccggagatccagtacacttccaactattacaagtctaataatgttgaatttgctgttaatactgaaggtgtatatagtgaaccccgccccattggcaccagatacctgactcgtaatctg

SEQ ID NO: 215 - DNA, 2229 bp, Adeno-Associated Virus 9
  source 1..2229: mol_type = other DNA
atggctgccgatggttatcttccagattggctcgaggacaaccttagtgaaggaattcgcgagtggtgggctttgaaacctggagcccctcaacccaaggcaaatcaacaacatcaagacaacgctcgaggtcttgtgcttccgggttacaaataccttggacccggcaacggactcgacaagggggagccggtcaacgcagcagacgcggcggccctcgagcacgacaaggcctacgaccagcagctcaaggccggagacaacccgtacctcaagtacaaccacgccgacgccgagttccaggagcggctcaaagaagatacgtcttttgggggcaacctcgggcgagcagtcttccaggccaaaaagaggcttcttgaacctcttggtctggttgaggaagcggctaagacggctcctggaaagaagaggcctgtagagcagtctcctcaggaaccggactcctccgcgggtattggcaaatcgggtgcacagcccgctaaaaagagactcaatttcggtcagactggcgacacagagtcagtcccagaccctcaaccaatcggagaacctcccgcagccccctcaggtgtgggatctcttacaatggcttcaggtggtggcgcaccagtggcagacaataacgaaggtgccgatggagtgggtagttcctcgggaaattggcattgcgattcccaatggctgggggacagagtcatcaccaccagcacccgaacctgggccctgcccacctacaacaatcacctctacaagcaaatctccaacagcacatctggaggatcttcaaatgacaacgcctacttcggctacagcaccccctgggggtattttgacttcaacagattccactgccacttctcaccacgtgactggcagcgactcatcaacaacaactggggattccggcctaagcgactcaacttcaagctcttcaacattcaggtcaaagaggttacggacaacaatggagtcaagaccatcgccaataaccttaccagcacggtccaggtcttcacggactcagactatcagctcccgtacgtgctcgggtcggctcacgagggctgcctcccgccgttcccagcggacgttttcatgattcctcagtacgggtatctgacgcttaatgatggaagccaggccgtgggtcgttcgtccttttactgcctggaatatttcccgtcgcaaatgctaagaacgggtaacaacttccagttcagctacgagtttgagaacgtacctttccatagcagctacgctcacagccaaagcctggaccgactaatgaatccactcatcgaccaatacttgtactatctctctagaactattaacggttctggacagaatcaacaaacgctaaaattcagtgtggccggacccagcaacatggctgtccagggaagaaactacatacctggacccagctaccgacaacaacgtgtctcaaccactgtgactcaaaacaacaacagcgaatttgcttggcctggagcttcttcttgggctctcaatggacgtaatagcttgatgaatcctggacctgctatggccagccacaaagaaggagaggaccgtttctttcctttgtctggatctttaatttttggcaaacaaggtaccggcagagacaacgtggatgcggacaaagtcatgataaccaacgaagaagaaattaaaactactaacccggtagcaacggagtcctatggacaagtggccacaaaccaccagagtgcccaaaatggtaaagccgatccgcgtgcgcaagcacagaccggttgggttcaaaaccaaggaatacttccgggtatggtttggcaggacagagatgtgtacctgcaaggacccatttgggccaaaattcctcacacggacggcaactttcacccttctccgctgatgggagggtttggaatgaagcacccgcctcctcagatcctcatcaaaaacacacctgtacctgcggatcctccaacggccttcaacaaggacaagctgaactctttcatcacccagtattctactggccaagtcagcgtggagatcgagtgggagctgcagaaggaaaacagcaagcgctggaacccggagatccagtacacttccaactattacaagtctaataatgttgaatttgctgttaatactgaaggtgtatatagtgaaccccgccccattggcaccagatacctgactcgtaatctg

SEQ ID NO: 216 - DNA, 2229 bp, Adeno-Associated Virus 9
  source 1..2229: mol_type = other DNA
atggctgccgatggttatcttccagattggctcgaggacaaccttagtgaaggaattcgcgagtggtgggctttgaaacctggagcccctcaacccaaggcaaatcaacaacatcaagacaacgctcgaggtcttgtgcttccgggttacaaataccttggacccggcaacggactcgacaagggggagccggtcaacgcagcagacgcggcggccctcgagcacgacaaggcctacgaccagcagctcaaggccggagacaacccgtacctcaagtacaaccacgccgacgccgagttccaggagcggctcaaagaagatacgtcttttgggggcaacctcgggcgagcagtcttccaggccaaaaagaggcttcttgaacctcttggtctggttgaggaagcggctaagacggctcctggaaagaagaggcctgtagagcagtctcctcaggaaccggactcctccgcgggtattggcaaatcgggtgcacagcccgctaaaaagagactcaatttcggtcagactggcgacacagagtcagtcccagaccctcaaccaatcggagaacctcccgcagccccctcaggtgtgggatctcttacaatggcttcaggtggtggcgcaccagtggcagacaataacgaaggtgccgatggagtgggtagttcctcgggaaattggcattgcgattcccaatggctgggggacagagtcatcaccaccagcacccgaacctgggccctgcccacctacaacaatcacctctacaagcaaatctccaacagcacatctggaggatcttcaaatgacaacgcctacttcggctacagcaccccctgggggtattttgacttcaacagattccactgccacttctcaccacgtgactggcagcgactcatcaacaacaactggggattccggcctaagcgactcaacttcaagctcttcaacattcaggtcaaagaggttacggacaacaatggagtcaagaccatcgccaataaccttaccagcacggtccaggtcttcacggactcagactatcagctcccgtacgtgctcgggtcggctcacgagggctgcctcccgccgttcccagcggacgttttcatgattcctcagtacgggtatctgacgcttaatgatggaagccaggccgtgggtcgttcgtccttttactgcctggaatatttcccgtcgcaaatgctaagaacgggtaacaacttccagttcagctacgagtttgagaacgtacctttccatagcagctacgctcacagccaaagcctggaccgactaatgaatccactcatcgaccaatacttgtactatctctctagaactattaacggttctggacagaatcaacaaacgctaaaattcagtgtggccggacccagcaacatggctgtccagggaagaaactacatacctggacccagctaccgacaacaacgtgtctcaaccactgtgactcaaaacaacaacagcgaatttgcttggcctggagcttcttcttgggctctcaatggacgtaatagcttgatgaatcctggacctgctatggccagccacaaagaaggagaggaccgtttctttcctttgtctggatctttaatttttggcaaacaaggtaccggcagagacaacgtggatgcggacaaagtcatgataaccaacgaagaagaaattaaaactactaacccggtagcaacggagtcctatggacaagtggccacaaaccaccagagtgctcagaatggtaaagccgatccacgagcacaggctcagaccggttgggttcaaaaccaaggaatacttccgggtatggtttggcaggacagagatgtgtacctgcaaggacccatttgggccaaaattcctcacacggacggcaactttcacccttctccgctgatgggagggtttggaatgaagcacccgcctcctcagatcctcatcaaaaacacacctgtacctgcggatcctccaacggccttcaacaaggacaagctgaactctttcatcacccagtattctactggccaagtcagcgtggagatcgagtgggagctgcagaaggaaaacagcaagcgctggaacccggagatccagtacacttccaactattacaagtctaataatgttgaatttgctgttaatactgaaggtgtatatagtgaaccccgccccattggcaccagatacctgactcgtaatctg

SEQ ID NO: 217 - DNA, 2229 bp, Adeno-Associated Virus 9
  source 1..2229: mol_type = other DNA
atggctgccgatggttatcttccagattggctcgaggacaaccttagtgaaggaattcgcgagtggtgggctttgaaacctggagcccctcaacccaaggcaaatcaacaacatcaagacaacgctcgaggtcttgtgcttccgggttacaaataccttggacccggcaacggactcgacaagggggagccggtcaacgcagcagacgcggcggccctcgagcacgacaaggcctacgaccagcagctcaaggccggagacaacccgtacctcaagtacaaccacgccgacgccgagttccaggagcggctcaaagaagatacgtcttttgggggcaacctcgggcgagcagtcttccaggccaaaaagaggcttcttgaacctcttggtctggttgaggaagcggctaagacggctcctggaaagaagaggcctgtagagcagtctcctcaggaaccggactcctccgcgggtattggcaaatcgggtgcacagcccgctaaaaagagactcaatttcggtcagactggcgacacagagtcagtcccagaccctcaaccaatcggagaacctcccgcagccccctcaggtgtgggatctcttacaatggcttcaggtggtggcgcaccagtggcagacaataacgaaggtgccgatggagtgggtagttcctcgggaaattggcattgcgattcccaatggctgggggacagagtcatcaccaccagcacccgaacctgggccctgcccacctacaacaatcacctctacaagcaaatctccaacagcacatctggaggatcttcaaatgacaacgcctacttcggctacagcaccccctgggggtattttgacttcaacagattccactgccacttctcaccacgtgactggcagcgactcatcaacaacaactggggattccggcctaagcgactcaacttcaagctcttcaacattcaggtcaaagaggttacggacaacaatggagtcaagaccatcgccaataaccttaccagcacggtccaggtcttcacggactcagactatcagctcccgtacgtgctcgggtcggctcacgagggctgcctcccgccgttcccagcggacgttttcatgattcctcagtacgggtatctgacgcttaatgatggaagccaggccgtgggtcgttcgtccttttactgcctggaatatttcccgtcgcaaatgctaagaacgggtaacaacttccagttcagctacgagtttgagaacgtacctttccatagcagctacgctcacagccaaagcctggaccgactaatgaatccactcatcgaccaatacttgtactatctctctagaactattaacggttctggacagaatcaacaaacgctaaaattcagtgtggccggacccagcaacatggctgtccagggaagaaactacatacctggacccagctaccgacaacaacgtgtctcaaccactgtgactcaaaacaacaacagcgaatttgcttggcctggagcttcttcttgggctctcaatggacgtaatagcttgatgaatcctggacctgctatggccagccacaaagaaggagaggaccgtttctttcctttgtctggatctttaatttttggcaaacaaggtaccggcagagacaacgtggatgcggacaaagtcatgataaccaacgaagaagaaattaaaactactaacccggtagcaacggagtcctatggacaagtggccacaaaccaccagagtgcgcagaacgggaaggcagaccctcgagcacaggcccaaaccggttgggttcaaaaccaaggaatacttccgggtatggtttggcaggacagagatgtgtacctgcaaggacccatttgggccaaaattcctcacacggacggcaactttcacccttctccgctgatgggagggtttggaatgaagcacccgcctcctcagatcctcatcaaaaacacacctgtacctgcggatcctccaacggccttcaacaaggacaagctgaactctttcatcacccagtattctactggccaagtcagcgtggagatcgagtgggagctgcagaaggaaaacagcaagcgctggaacccggagatccagtacacttccaactattacaagtctaataatgttgaatttgctgttaatactgaaggtgtatatagtgaaccccgccccattggcaccagatacctgactcgtaatctg

SEQ ID NO: 218 - DNA, 2229 bp, Adeno-Associated Virus 9
  source 1..2229: mol_type = other DNA
atggctgccgatggttatcttccagattggctcgaggacaaccttagtgaaggaattcgcgagtggtgggctttgaaacctggagcccctcaacccaaggcaaatcaacaacatcaagacaacgctcgaggtcttgtgcttccgggttacaaataccttggacccggcaacggactcgacaagggggagccggtcaacgcagcagacgcggcggccctcgagcacgacaaggcctacgaccagcagctcaaggccggagacaacccgtacctcaagtacaaccacgccgacgccgagttccaggagcggctcaaagaagatacgtcttttgggggcaacctcgggcgagcagtcttccaggccaaaaagaggcttcttgaacctcttggtctggttgaggaagcggctaagacggctcctggaaagaagaggcctgtagagcagtctcctcaggaaccggactcctccgcgggtattggcaaatcgggtgcacagcccgctaaaaagagactcaatttcggtcagactggcgacacagagtcagtcccagaccctcaaccaatcggagaacctcccgcagccccctcaggtgtgggatctcttacaatggcttcaggtggtggcgcaccagtggcagacaataacgaaggtgccgatggagtgggtagttcctcgggaaattggcattgcgattcccaatggctgggggacagagtcatcaccaccagcacccgaacctgggccctgcccacctacaacaatcacctctacaagcaaatctccaacagcacatctggaggatcttcaaatgacaacgcctacttcggctacagcaccccctgggggtattttgacttcaacagattccactgccacttctcaccacgtgactggcagcgactcatcaacaacaactggggattccggcctaagcgactcaacttcaagctcttcaacattcaggtcaaagaggttacggacaacaatggagtcaagaccatcgccaataaccttaccagcacggtccaggtcttcacggactcagactatcagctcccgtacgtgctcgggtcggctcacgagggctgcctcccgccgttcccagcggacgttttcatgattcctcagtacgggtatctgacgcttaatgatggaagccaggccgtgggtcgttcgtccttttactgcctggaatatttcccgtcgcaaatgctaagaacgggtaacaacttccagttcagctacgagtttgagaacgtacctttccatagcagctacgctcacagccaaagcctggaccgactaatgaatccactcatcgaccaatacttgtactatctctctagaactattaacggttctggacagaatcaacaaacgctaaaattcagtgtggccggacccagcaacatggctgtccagggaagaaactacatacctggacccagctaccgacaacaacgtgtctcaaccactgtgactcaaaacaacaacagcgaatttgcttggcctggagcttcttcttgggctctcaatggacgtaatagcttgatgaatcctggacctgctatggccagccacaaagaaggagaggaccgtttctttcctttgtctggatctttaatttttggcaaacaaggtaccggcagagacaacgtggatgcggacaaagtcatgataaccaacgaagaagaaattaaaactactaacccggtagcaacggagtcctatggacaagtggccacaaaccaccagagtgcccaaaacggaaaagccgatccacgggcgcaagcccaaaccggttgggttcaaaaccaaggaatacttccgggtatggtttggcaggacagagatgtgtacctgcaaggacccatttgggccaaaattcctcacacggacggcaactttcacccttctccgctgatgggagggtttggaatgaagcacccgcctcctcagatcctcatcaaaaacacacctgtacctgcggatcctccaacggccttcaacaaggacaagctgaactctttcatcacccagtattctactggccaagtcagcgtggagatcgagtgggagctgcagaaggaaaacagcaagcgctggaacccggagatccagtacacttccaactattacaagtctaataatgttgaatttgctgttaatactgaaggtgtatatagtgaaccccgccccattggcaccagatacctgactcgtaatctg

SEQ ID NO: 219 - DNA, 2229 bp, Adeno-Associated Virus 9
  source 1..2229: mol_type = other DNA
atggctgccgatggttatcttccagattggctcgaggacaaccttagtgaaggaattcgcgagtggtgggctttgaaacctggagcccctcaacccaaggcaaatcaacaacatcaagacaacgctcgaggtcttgtgcttccgggttacaaataccttggacccggcaacggactcgacaagggggagccggtcaacgcagcagacgcggcggccctcgagcacgacaaggcctacgaccagcagctcaaggccggagacaacccgtacctcaagtacaaccacgccgacgccgagttccaggagcggctcaaagaagatacgtcttttgggggcaacctcgggcgagcagtcttccaggccaaaaagaggcttcttgaacctcttggtctggttgaggaagcggctaagacggctcctggaaagaagaggcctgtagagcagtctcctcaggaaccggactcctccgcgggtattggcaaatcgggtgcacagcccgctaaaaagagactcaatttcggtcagactggcgacacagagtcagtcccagaccctcaaccaatcggagaacctcccgcagccccctcaggtgtgggatctcttacaatggcttcaggtggtggcgcaccagtggcagacaataacgaaggtgccgatggagtgggtagttcctcgggaaattggcattgcgattcccaatggctgggggacagagtcatcaccaccagcacccgaacctgggccctgcccacctacaacaatcacctctacaagcaaatctccaacagcacatctggaggatcttcaaatgacaacgcctacttcggctacagcaccccctgggggtattttgacttcaacagattccactgccacttctcaccacgtgactggcagcgactcatcaacaacaactggggattccggcctaagcgactcaacttcaagctcttcaacattcaggtcaaagaggttacggacaacaatggagtcaagaccatcgccaataaccttaccagcacggtccaggtcttcacggactcagactatcagctcccgtacgtgctcgggtcggctcacgagggctgcctcccgccgttcccagcggacgttttcatgattcctcagtacgggtatctgacgcttaatgatggaagccaggccgtgggtcgttcgtccttttactgcctggaatatttcccgtcgcaaatgctaagaacgggtaacaacttccagttcagctacgagtttgagaacgtacctttccatagcagctacgctcacagccaaagcctggaccgactaatgaatccactcatcgaccaatacttgtactatctctctagaactattaacggttctggacagaatcaacaaacgctaaaattcagtgtggccggacccagcaacatggctgtccagggaagaaactacatacctggacccagctaccgacaacaacgtgtctcaaccactgtgactcaaaacaacaacagcgaatttgcttggcctggagcttcttcttgggctctcaatggacgtaatagcttgatgaatcctggacctgctatggccagccacaaagaaggagaggaccgtttctttcctttgtctggatctttaatttttggcaaacaaggtaccggcagagacaacgtggatgcggacaaagtcatgataaccaacgaagaagaaattaaaactactaacccggtagcaacggagtcctatggacaagtggccacaaaccaccagagtgcacaaaatgggaaagcggacccgagggcccaagcccagaccggttgggttcaaaaccaaggaatacttccgggtatggtttggcaggacagagatgtgtacctgcaaggacccatttgggccaaaattcctcacacggacggcaactttcacccttctccgctgatgggagggtttggaatgaagcacccgcctcctcagatcctcatcaaaaacacacctgtacctgcggatcctccaacggccttcaacaaggacaagctgaactctttcatcacccagtattctactggccaagtcagcgtggagatcgagtgggagctgcagaaggaaaacagcaagcgctggaacccggagatccagtacacttccaactattacaagtctaataatgttgaatttgctgttaatactgaaggtgtatatagtgaaccccgccccattggcaccagatacctgactcgtaatctg

SEQ ID NO: 220 - DNA, 2229 bp, Adeno-Associated Virus 9
  source 1..2229: mol_type = other DNA
atggctgccgatggttatcttccagattggctcgaggacaaccttagtgaaggaattcgcgagtggtgggctttgaaacctggagcccctcaacccaaggcaaatcaacaacatcaagacaacgctcgaggtcttgtgcttccgggttacaaataccttggacccggcaacggactcgacaagggggagccggtcaacgcagcagacgcggcggccctcgagcacgacaaggcctacgaccagcagctcaaggccggagacaacccgtacctcaagtacaaccacgccgacgccgagttccaggagcggctcaaagaagatacgtcttttgggggcaacctcgggcgagcagtcttccaggccaaaaagaggcttcttgaacctcttggtctggttgaggaagcggctaagacggctcctggaaagaagaggcctgtagagcagtctcctcaggaaccggactcctccgcgggtattggcaaatcgggtgcacagcccgctaaaaagagactcaatttcggtcagactggcgacacagagtcagtcccagaccctcaaccaatcggagaacctcccgcagccccctcaggtgtgggatctcttacaatggcttcaggtggtggcgcaccagtggcagacaataacgaaggtgccgatggagtgggtagttcctcgggaaattggcattgcgattcccaatggctgggggacagagtcatcaccaccagcacccgaacctgggccctgcccacctacaacaatcacctctacaagcaaatctccaacagcacatctggaggatcttcaaatgacaacgcctacttcggctacagcaccccctgggggtattttgacttcaacagattccactgccacttctcaccacgtgactggcagcgactcatcaacaacaactggggattccggcctaagcgactcaacttcaagctcttcaacattcaggtcaaagaggttacggacaacaatggagtcaagaccatcgccaataaccttaccagcacggtccaggtcttcacggactcagactatcagctcccgtacgtgctcgggtcggctcacgagggctgcctcccgccgttcccagcggacgttttcatgattcctcagtacgggtatctgacgcttaatgatggaagccaggccgtgggtcgttcgtccttttactgcctggaatatttcccgtcgcaaatgctaagaacgggtaacaacttccagttcagctacgagtttgagaacgtacctttccatagcagctacgctcacagccaaagcctggaccgactaatgaatccactcatcgaccaatacttgtactatctctctagaactattaacggttctggacagaatcaacaaacgctaaaattcagtgtggccggacccagcaacatggctgtccagggaagaaactacatacctggacccagctaccgacaacaacgtgtctcaaccactgtgactcaaaacaacaacagcgaatttgcttggcctggagcttcttcttgggctctcaatggacgtaatagcttgatgaatcctggacctgctatggccagccacaaagaaggagaggaccgtttctttcctttgtctggatctttaatttttggcaaacaaggtaccggcagagacaacgtggatgcggacaaagtcatgataaccaacgaagaagaaattaaaactactaacccggtagcaacggagtcctatggacaagtggccacaaaccaccagagtgctcaaaacgggaaggccgatccccgcgcacaggcccagaccggttgggttcaaaaccaaggaatacttccgggtatggtttggcaggacagagatgtgtacctgcaaggacccatttgggccaaaattcctcacacggacggcaactttcacccttctccgctgatgggagggtttggaatgaagcacccgcctcctcagatcctcatcaaaaacacacctgtacctgcggatcctccaacggccttcaacaaggacaagctgaactctttcatcacccagtattctactggccaagtcagcgtggagatcgagtgggagctgcagaaggaaaacagcaagcgctggaacccggagatccagtacacttccaactattacaagtctaataatgttgaatttgctgttaatactgaaggtgtatatagtgaaccccgccccattggcaccagatacctgactcgtaatctg

SEQ ID NO: 221 - DNA, 2229 bp, Adeno-Associated Virus 9
  source 1..2229: mol_type = other DNA
atggctgccgatggttatcttccagattggctcgaggacaaccttagtgaaggaattcgcgagtggtgggctttgaaacctggagcccctcaacccaaggcaaatcaacaacatcaagacaacgctcgaggtcttgtgcttccgggttacaaataccttggacccggcaacggactcgacaagggggagccggtcaacgcagcagacgcggcggccctcgagcacgacaaggcctacgaccagcagctcaaggccggagacaacccgtacctcaagtacaaccacgccgacgccgagttccaggagcggctcaaagaagatacgtcttttgggggcaacctcgggcgagcagtcttccaggccaaaaagaggcttcttgaacctcttggtctggttgaggaagcggctaagacggctcctggaaagaagaggcctgtagagcagtctcctcaggaaccggactcctccgcgggtattggcaaatcgggtgcacagcccgctaaaaagagactcaatttcggtcagactggcgacacagagtcagtcccagaccctcaaccaatcggagaacctcccgcagccccctcaggtgtgggatctcttacaatggcttcaggtggtggcgcaccagtggcagacaataacgaaggtgccgatggagtgggtagttcctcgggaaattggcattgcgattcccaatggctgggggacagagtcatcaccaccagcacccgaacctgggccctgcccacctacaacaatcacctctacaagcaaatctccaacagcacatctggaggatcttcaaatgacaacgcctacttcggctacagcaccccctgggggtattttgacttcaacagattccactgccacttctcaccacgtgactggcagcgactcatcaacaacaactggggattccggcctaagcgactcaacttcaagctcttcaacattcaggtcaaagaggttacggacaacaatggagtcaagaccatcgccaataaccttaccagcacggtccaggtcttcacggactcagactatcagctcccgtacgtgctcgggtcggctcacgagggctgcctcccgccgttcccagcggacgttttcatgattcctcagtacgggtatctgacgcttaatgatggaagccaggccgtgggtcgttcgtccttttactgcctggaatatttcccgtcgcaaatgctaagaacgggtaacaacttccagttcagctacgagtttgagaacgtacctttccatagcagctacgctcacagccaaagcctggaccgactaatgaatccactcatcgaccaatacttgtactatctctctagaactattaacggttctggacagaatcaacaaacgctaaaattcagtgtggccggacccagcaacatggctgtccagggaagaaactacatacctggacccagctaccgacaacaacgtgtctcaaccactgtgactcaaaacaacaacagcgaatttgcttggcctggagcttcttcttgggctctcaatggacgtaatagcttgatgaatcctggacctgctatggccagccacaaagaaggagaggaccgtttctttcctttgtctggatctttaatttttggcaaacaaggtaccggcagagacaacgtggatgcggacaaagtcatgataaccaacgaagaagaaattaaaactactaacccggtagcaacggagtcctatggacaagtggccacaaaccaccagagtgcacagcccagttcaggcgatccccgagcccaggcacagaccggttgggttcaaaaccaaggaatacttccgggtatggtttggcaggacagagatgtgtacctgcaaggacccatttgggccaaaattcctcacacggacggcaactttcacccttctccgctgatgggagggtttggaatgaagcacccgcctcctcagatcctcatcaaaaacacacctgtacctgcggatcctccaacggccttcaacaaggacaagctgaactctttcatcacccagtattctactggccaagtcagcgtggagatcgagtgggagctgcagaaggaaaacagcaagcgctggaacccggagatccagtacacttccaactattacaagtctaataatgttgaatttgctgttaatactgaaggtgtatatagtgaaccccgccccattggcaccagatacctgactcgtaatctg

SEQ ID NO: 222 - DNA, 2229 bp, Adeno-Associated Virus 9
  source 1..2229: mol_type = other DNA
atggctgccgatggttatcttccagattggctcgaggacaaccttagtgaaggaattcgcgagtggtgggctttgaaacctggagcccctcaacccaaggcaaatcaacaacatcaagacaacgctcgaggtcttgtgcttccgggttacaaataccttggacccggcaacggactcgacaagggggagccggtcaacgcagcagacgcggcggccctcgagcacgacaaggcctacgaccagcagctcaaggccggagacaacccgtacctcaagtacaaccacgccgacgccgagttccaggagcggctcaaagaagatacgtcttttgggggcaacctcgggcgagcagtcttccaggccaaaaagaggcttcttgaacctcttggtctggttgaggaagcggctaagacggctcctggaaagaagaggcctgtagagcagtctcctcaggaaccggactcctccgcgggtattggcaaatcgggtgcacagcccgctaaaaagagactcaatttcggtcagactggcgacacagagtcagtcccagaccctcaaccaatcggagaacctcccgcagccccctcaggtgtgggatctcttacaatggcttcaggtggtggcgcaccagtggcagacaataacgaaggtgccgatggagtgggtagttcctcgggaaattggcattgcgattcccaatggctgggggacagagtcatcaccaccagcacccgaacctgggccctgcccacctacaacaatcacctctacaagcaaatctccaacagcacatctggaggatcttcaaatgacaacgcctacttcggctacagcaccccctgggggtattttgacttcaacagattccactgccacttctcaccacgtgactggcagcgactcatcaacaacaactggggattccggcctaagcgactcaacttcaagctcttcaacattcaggtcaaagaggttacggacaacaatggagtcaagaccatcgccaataaccttaccagcacggtccaggtcttcacggactcagactatcagctcccgtacgtgctcgggtcggctcacgagggctgcctcccgccgttcccagcggacgttttcatgattcctcagtacgggtatctgacgcttaatgatggaagccaggccgtgggtcgttcgtccttttactgcctggaatatttcccgtcgcaaatgctaagaacgggtaacaacttccagttcagctacgagtttgagaacgtacctttccatagcagctacgctcacagccaaagcctggaccgactaatgaatccactcatcgaccaatacttgtactatctctctagaactattaacggttctggacagaatcaacaaacgctaaaattcagtgtggccggacccagcaacatggctgtccagggaagaaactacatacctggacccagctaccgacaacaacgtgtctcaaccactgtgactcaaaacaacaacagcgaatttgcttggcctggagcttcttcttgggctctcaatggacgtaatagcttgatgaatcctggacctgctatggccagccacaaagaaggagaggaccgtttctttcctttgtctggatctttaatttttggcaaacaaggtaccggcagagacaacgtggatgcggacaaagtcatgataaccaacgaagaagaaattaaaactactaacccggtagcaacggagtcctatggacaagtggccacaaaccaccagagtgcgcaaccttccagcggagaccctcgtgctcaggcgcaaaccggttgggttcaaaaccaaggaatacttccgggtatggtttggcaggacagagatgtgtacctgcaaggacccatttgggccaaaattcctcacacggacggcaactttcacccttctccgctgatgggagggtttggaatgaagcacccgcctcctcagatcctcatcaaaaacacacctgtacctgcggatcctccaacggccttcaacaaggacaagctgaactctttcatcacccagtattctactggccaagtcagcgtggagatcgagtgggagctgcagaaggaaaacagcaagcgctggaacccggagatccagtacacttccaactattacaagtctaataatgttgaatttgctgttaatactgaaggtgtatatagtgaaccccgccccattggcaccagatacctgactcgtaatctg

SEQ ID NO: 223 - DNA, 2229 bp, Adeno-Associated Virus 9
  source 1..2229: mol_type = other DNA
atggctgccgatggttatcttccagattggctcgaggacaaccttagtgaaggaattcgcgagtggtgggctttgaaacctggagcccctcaacccaaggcaaatcaacaacatcaagacaacgctcgaggtcttgtgcttccgggttacaaataccttggacccggcaacggactcgacaagggggagccggtcaacgcagcagacgcggcggccctcgagcacgacaaggcctacgaccagcagctcaaggccggagacaacccgtacctcaagtacaaccacgccgacgccgagttccaggagcggctcaaagaagatacgtcttttgggggcaacctcgggcgagcagtcttccaggccaaaaagaggcttcttgaacctcttggtctggttgaggaagcggctaagacggctcctggaaagaagaggcctgtagagcagtctcctcaggaaccggactcctccgcgggtattggcaaatcgggtgcacagcccgctaaaaagagactcaatttcggtcagactggcgacacagagtcagtcccagaccctcaaccaatcggagaacctcccgcagccccctcaggtgtgggatctcttacaatggcttcaggtggtggcgcaccagtggcagacaataacgaaggtgccgatggagtgggtagttcctcgggaaattggcattgcgattcccaatggctgggggacagagtcatcaccaccagcacccgaacctgggccctgcccacctacaacaatcacctctacaagcaaatctccaacagcacatctggaggatcttcaaatgacaacgcctacttcggctacagcaccccctgggggtattttgacttcaacagattccactgccacttctcaccacgtgactggcagcgactcatcaacaacaactggggattccggcctaagcgactcaacttcaagctcttcaacattcaggtcaaagaggttacggacaacaatggagtcaagaccatcgccaataaccttaccagcacggtccaggtcttcacggactcagactatcagctcccgtacgtgctcgggtcggctcacgagggctgcctcccgccgttcccagcggacgttttcatgattcctcagtacgggtatctgacgcttaatgatggaagccaggccgtgggtcgttcgtccttttactgcctggaatatttcccgtcgcaaatgctaagaacgggtaacaacttccagttcagctacgagtttgagaacgtacctttccatagcagctacgctcacagccaaagcctggaccgactaatgaatccactcatcgaccaatacttgtactatctctctagaactattaacggttctggacagaatcaacaaacgctaaaattcagtgtggccggacccagcaacatggctgtccagggaagaaactacatacctggacccagctaccgacaacaacgtgtctcaaccactgtgactcaaaacaacaacagcgaatttgcttggcctggagcttcttcttgggctctcaatggacgtaatagcttgatgaatcctggacctgctatggccagccacaaagaaggagaggaccgtttctttcctttgtctggatctttaatttttggcaaacaaggtaccggcagagacaacgtggatgcggacaaagtcatgataaccaacgaagaagaaattaaaactactaacccggtagcaacggagtcctatggacaagtggccacaaaccaccagagtgctcaaccgtcgagcggtgatccccgtgctcaagcgcaaaccggttgggttcaaaaccaaggaatacttccgggtatggtttggcaggacagagatgtgtacctgcaaggacccatttgggccaaaattcctcacacggacggcaactttcacccttctccgctgatgggagggtttggaatgaagcacccgcctcctcagatcctcatcaaaaacacacctgtacctgcggatcctccaacggccttcaacaaggacaagctgaactctttcatcacccagtattctactggccaagtcagcgtggagatcgagtgggagctgcagaaggaaaacagcaagcgctggaacccggagatccagtacacttccaactattacaagtctaataatgttgaatttgctgttaatactgaaggtgtatatagtgaaccccgccccattggcaccagatacctgactcgtaatctg

SEQ ID NO: 224 - DNA, 2229 bp, Adeno-Associated Virus 9
  source 1..2229: mol_type = other DNA
atggctgccgatggttatcttccagattggctcgaggacaaccttagtgaaggaattcgcgagtggtgggctttgaaacctggagcccctcaacccaaggcaaatcaacaacatcaagacaacgctcgaggtcttgtgcttccgggttacaaataccttggacccggcaacggactcgacaagggggagccggtcaacgcagcagacgcggcggccctcgagcacgacaaggcctacgaccagcagctcaaggccggagacaacccgtacctcaagtacaaccacgccgacgccgagttccaggagcggctcaaagaagatacgtcttttgggggcaacctcgggcgagcagtcttccaggccaaaaagaggcttcttgaacctcttggtctggttgaggaagcggctaagacggctcctggaaagaagaggcctgtagagcagtctcctcaggaaccggactcctccgcgggtattggcaaatcgggtgcacagcccgctaaaaagagactcaatttcggtcagactggcgacacagagtcagtcccagaccctcaaccaatcggagaacctcccgcagccccctcaggtgtgggatctcttacaatggcttcaggtggtggcgcaccagtggcagacaataacgaaggtgccgatggagtgggtagttcctcgggaaattggcattgcgattcccaatggctgggggacagagtcatcaccaccagcacccgaacctgggccctgcccacctacaacaatcacctctacaagcaaatctccaacagcacatctggaggatcttcaaatgacaacgcctacttcggctacagcaccccctgggggtattttgacttcaacagattccactgccacttctcaccacgtgactggcagcgactcatcaacaacaactggggattccggcctaagcgactcaacttcaagctcttcaacattcaggtcaaagaggttacggacaacaatggagtcaagaccatcgccaataaccttaccagcacggtccaggtcttcacggactcagactatcagctcccgtacgtgctcgggtcggctcacgagggctgcctcccgccgttcccagcggacgttttcatgattcctcagtacgggtatctgacgcttaatgatggaagccaggccgtgggtcgttcgtccttttactgcctggaatatttcccgtcgcaaatgctaagaacgggtaacaacttccagttcagctacgagtttgagaacgtacctttccatagcagctacgctcacagccaaagcctggaccgactaatgaatccactcatcgaccaatacttgtactatctctctagaactattaacggttctggacagaatcaacaaacgctaaaattcagtgtggccggacccagcaacatggctgtccagggaagaaactacatacctggacccagctaccgacaacaacgtgtctcaaccactgtgactcaaaacaacaacagcgaatttgcttggcctggagcttcttcttgggctctcaatggacgtaatagcttgatgaatcctggacctgctatggccagccacaaagaaggagaggaccgtttctttcctttgtctggatctttaatttttggcaaacaaggtaccggcagagacaacgtggatgcggacaaagtcatgataaccaacgaagaagaaattaaaactactaacccggtagcaacggagtcctatggacaagtggccacaaaccaccagagtgctcagccatcatccggcgatccccgggcgcaagcacagaccggttgggttcaaaaccaaggaatacttccgggtatggtttggcaggacagagatgtgtacctgcaaggacccatttgggccaaaattcctcacacggacggcaactttcacccttctccgctgatgggagggtttggaatgaagcacccgcctcctcagatcctcatcaaaaacacacctgtacctgcggatcctccaacggccttcaacaaggacaagctgaactctttcatcacccagtattctactggccaagtcagcgtggagatcgagtgggagctgcagaaggaaaacagcaagcgctggaacccggagatccagtacacttccaactattacaagtctaataatgttgaatttgctgttaatactgaaggtgtatatagtgaaccccgccccattggcaccagatacctgactcgtaatctg

SEQ ID NO: 225 - DNA, 2229 bp, Adeno-Associated Virus 9
  source 1..2229: mol_type = other DNA
atggctgccgatggttatcttccagattggctcgaggacaaccttagtgaaggaattcgcgagtggtgggctttgaaacctggagcccctcaacccaaggcaaatcaacaacatcaagacaacgctcgaggtcttgtgcttccgggttacaaataccttggacccggcaacggactcgacaagggggagccggtcaacgcagcagacgcggcggccctcgagcacgacaaggcctacgaccagcagctcaaggccggagacaacccgtacctcaagtacaaccacgccgacgccgagttccaggagcggctcaaagaagatacgtcttttgggggcaacctcgggcgagcagtcttccaggccaaaaagaggcttcttgaacctcttggtctggttgaggaagcggctaagacggctcctggaaagaagaggcctgtagagcagtctcctcaggaaccggactcctccgcgggtattggcaaatcgggtgcacagcccgctaaaaagagactcaatttcggtcagactggcgacacagagtcagtcccagaccctcaaccaatcggagaacctcccgcagccccctcaggtgtgggatctcttacaatggcttcaggtggtggcgcaccagtggcagacaataacgaaggtgccgatggagtgggtagttcctcgggaaattggcattgcgattcccaatggctgggggacagagtcatcaccaccagcacccgaacctgggccctgcccacctacaacaatcacctctacaagcaaatctccaacagcacatctggaggatcttcaaatgacaacgcctacttcggctacagcaccccctgggggtattttgacttcaacagattccactgccacttctcaccacgtgactggcagcgactcatcaacaacaactggggattccggcctaagcgactcaacttcaagctcttcaacattcaggtcaaagaggttacggacaacaatggagtcaagaccatcgccaataaccttaccagcacggtccaggtcttcacggactcagactatcagctcccgtacgtgctcgggtcggctcacgagggctgcctcccgccgttcccagcggacgttttcatgattcctcagtacgggtatctgacgcttaatgatggaagccaggccgtgggtcgttcgtccttttactgcctggaatatttcccgtcgcaaatgctaagaacgggtaacaacttccagttcagctacgagtttgagaacgtacctttccatagcagctacgctcacagccaaagcctggaccgactaatgaatccactcatcgaccaatacttgtactatctctctagaactattaacggttctggacagaatcaacaaacgctaaaattcagtgtggccggacccagcaacatggctgtccagggaagaaactacatacctggacccagctaccgacaacaacgtgtctcaaccactgtgactcaaaacaacaacagcgaatttgcttggcctggagcttcttcttgggctctcaatggacgtaatagcttgatgaatcctggacctgctatggccagccacaaagaaggagaggaccgtttctttcctttgtctggatctttaatttttggcaaacaaggtaccggcagagacaacgtggatgcggacaaagtcatgataaccaacgaagaagaaattaaaactactaacccggtagcaacggagtcctatggacaagtggccacaaaccaccagagtgcacagccctcgtcgggggatcctagagcccaagcgcagaccggttgggttcaaaaccaaggaatacttccgggtatggtttggcaggacagagatgtgtacctgcaaggacccatttgggccaaaattcctcacacggacggcaactttcacccttctccgctgatgggagggtttggaatgaagcacccgcctcctcagatcctcatcaaaaacacacctgtacctgcggatcctccaacggccttcaacaaggacaagctgaactctttcatcacccagtattctactggccaagtcagcgtggagatcgagtgggagctgcagaaggaaaacagcaagcgctggaacccggagatccagtacacttccaactattacaagtctaataatgttgaatttgctgttaatactgaaggtgtatatagtgaaccccgccccattggcaccagatacctgactcgtaatctg

SEQ ID NO: 226 - DNA, 2229 bp, Adeno-Associated Virus 9
  source 1..2229: mol_type = other DNA
atggctgccgatggttatcttccagattggctcgaggacaaccttagtgaaggaattcgcgagtggtgggctttgaaacctggagcccctcaacccaaggcaaatcaacaacatcaagacaacgctcgaggtcttgtgcttccgggttacaaataccttggacccggcaacggactcgacaagggggagccggtcaacgcagcagacgcggcggccctcgagcacgacaaggcctacgaccagcagctcaaggccggagacaacccgtacctcaagtacaaccacgccgacgccgagttccaggagcggctcaaagaagatacgtcttttgggggcaacctcgggcgagcagtcttccaggccaaaaagaggcttcttgaacctcttggtctggttgaggaagcggctaagacggctcctggaaagaagaggcctgtagagcagtctcctcaggaaccggactcctccgcgggtattggcaaatcgggtgcacagcccgctaaaaagagactcaatttcggtcagactggcgacacagagtcagtcccagaccctcaaccaatcggagaacctcccgcagccccctcaggtgtgggatctcttacaatggcttcaggtggtggcgcaccagtggcagacaataacgaaggtgccgatggagtgggtagttcctcgggaaattggcattgcgattcccaatggctgggggacagagtcatcaccaccagcacccgaacctgggccctgcccacctacaacaatcacctctacaagcaaatctccaacagcacatctggaggatcttcaaatgacaacgcctacttcggctacagcaccccctgggggtattttgacttcaacagattccactgccacttctcaccacgtgactggcagcgactcatcaacaacaactggggattccggcctaagcgactcaacttcaagctcttcaacattcaggtcaaagaggttacggacaacaatggagtcaagaccatcgccaataaccttaccagcacggtccaggtcttcacggactcagactatcagctcccgtacgtgctcgggtcggctcacgagggctgcctcccgccgttcccagcggacgttttcatgattcctcagtacgggtatctgacgcttaatgatggaagccaggccgtgggtcgttcgtccttttactgcctggaatatttcccgtcgcaaatgctaagaacgggtaacaacttccagttcagctacgagtttgagaacgtacctttccatagcagctacgctcacagccaaagcctggaccgactaatgaatccactcatcgaccaatacttgtactatctctctagaactattaacggttctggacagaatcaacaaacgctaaaattcagtgtggccggacccagcaacatggctgtccagggaagaaactacatacctggacccagctaccgacaacaacgtgtctcaaccactgtgactcaaaacaacaacagcgaatttgcttggcctggagcttcttcttgggctctcaatggacgtaatagcttgatgaatcctggacctgctatggccagccacaaagaaggagaggaccgtttctttcctttgtctggatctttaatttttggcaaacaaggtaccggcagagacaacgtggatgcggacaaagtcatgataaccaacgaagaagaaattaaaactactaacccggtagcaacggagtcctatggacaagtggccacaaaccaccagagtgcccaaccgagcagtggagacccaagggcacaagcgcaaaccggttgggttcaaaaccaaggaatacttccgggtatggtttggcaggacagagatgtgtacctgcaaggacccatttgggccaaaattcctcacacggacggcaactttcacccttctccgctgatgggagggtttggaatgaagcacccgcctcctcagatcctcatcaaaaacacacctgtacctgcggatcctccaacggccttcaacaaggacaagctgaactctttcatcacccagtattctactggccaagtcagcgtggagatcgagtgggagctgcagaaggaaaacagcaagcgctggaacccggagatccagtacacttccaactattacaagtctaataatgttgaatttgctgttaatactgaaggtgtatatagtgaaccccgccccattggcaccagatacctgactcgtaatctg

SEQ ID NO: 227 - DNA, 2229 bp, Adeno-Associated Virus 9
  source 1..2229: mol_type = other DNA
atggctgccgatggttatcttccagattggctcgaggacaaccttagtgaaggaattcgcgagtggtgggctttgaaacctggagcccctcaacccaaggcaaatcaacaacatcaagacaacgctcgaggtcttgtgcttccgggttacaaataccttggacccggcaacggactcgacaagggggagccggtcaacgcagcagacgcggcggccctcgagcacgacaaggcctacgaccagcagctcaaggccggagacaacccgtacctcaagtacaaccacgccgacgccgagttccaggagcggctcaaagaagatacgtcttttgggggcaacctcgggcgagcagtcttccaggccaaaaagaggcttcttgaacctcttggtctggttgaggaagcggctaagacggctcctggaaagaagaggcctgtagagcagtctcctcaggaaccggactcctccgcgggtattggcaaatcgggtgcacagcccgctaaaaagagactcaatttcggtcagactggcgacacagagtcagtcccagaccctcaaccaatcggagaacctcccgcagccccctcaggtgtgggatctcttacaatggcttcaggtggtggcgcaccagtggcagacaataacgaaggtgccgatggagtgggtagttcctcgggaaattggcattgcgattcccaatggctgggggacagagtcatcaccaccagcacccgaacctgggccctgcccacctacaacaatcacctctacaagcaaatctccaacagcacatctggaggatcttcaaatgacaacgcctacttcggctacagcaccccctgggggtattttgacttcaacagattccactgccacttctcaccacgtgactggcagcgactcatcaacaacaactggggattccggcctaagcgactcaacttcaagctcttcaacattcaggtcaaagaggttacggacaacaatggagtcaagaccatcgccaataaccttaccagcacggtccaggtcttcacggactcagactatcagctcccgtacgtgctcgggtcggctcacgagggctgcctcccgccgttcccagcggacgttttcatgattcctcagtacgggtatctgacgcttaatgatggaagccaggccgtgggtcgttcgtccttttactgcctggaatatttcccgtcgcaaatgctaagaacgggtaacaacttccagttcagctacgagtttgagaacgtacctttccatagcagctacgctcacagccaaagcctggaccgactaatgaatccactcatcgaccaatacttgtactatctctctagaactattaacggttctggacagaatcaacaaacgctaaaattcagtgtggccggacccagcaacatggctgtccagggaagaaactacatacctggacccagctaccgacaacaacgtgtctcaaccactgtgactcaaaacaacaacagcgaatttgcttggcctggagcttcttcttgggctctcaatggacgtaatagcttgatgaatcctggacctgctatggccagccacaaagaaggagaggaccgtttctttcctttgtctggatctttaatttttggcaaacaaggtaccggcagagacaacgtggatgcggacaaagtcatgataaccaacgaagaagaaattaaaactactaacccggtagcaacggagtcctatggacaagtggccacaaaccaccagagtgcacaacccagctctggggatcccagggcccaggctcagaccggttgggttcaaaaccaaggaatacttccgggtatggtttggcaggacagagatgtgtacctgcaaggacccatttgggccaaaattcctcacacggacggcaactttcacccttctccgctgatgggagggtttggaatgaagcacccgcctcctcagatcctcatcaaaaacacacctgtacctgcggatcctccaacggccttcaacaaggacaagctgaactctttcatcacccagtattctactggccaagtcagcgtggagatcgagtgggagctgcagaaggaaaacagcaagcgctggaacccggagatccagtacacttccaactattacaagtctaataatgttgaatttgctgttaatactgaaggtgtatatagtgaaccccgccccattggcaccagatacctgactcgtaatctg

SEQ ID NO: 228 - DNA, 2229 bp, Adeno-Associated Virus 9
  source 1..2229: mol_type = other DNA
atggctgccgatggttatcttccagattggctcgaggacaaccttagtgaaggaattcgcgagtggtgggctttgaaacctggagcccctcaacccaaggcaaatcaacaacatcaagacaacgctcgaggtcttgtgcttccgggttacaaataccttggacccggcaacggactcgacaagggggagccggtcaacgcagcagacgcggcggccctcgagcacgacaaggcctacgaccagcagctcaaggccggagacaacccgtacctcaagtacaaccacgccgacgccgagttccaggagcggctcaaagaagatacgtcttttgggggcaacctcgggcgagcagtcttccaggccaaaaagaggcttcttgaacctcttggtctggttgaggaagcggctaagacggctcctggaaagaagaggcctgtagagcagtctcctcaggaaccggactcctccgcgggtattggcaaatcgggtgcacagcccgctaaaaagagactcaatttcggtcagactggcgacacagagtcagtcccagaccctcaaccaatcggagaacctcccgcagccccctcaggtgtgggatctcttacaatggcttcaggtggtggcgcaccagtggcagacaataacgaaggtgccgatggagtgggtagttcctcgggaaattggcattgcgattcccaatggctgggggacagagtcatcaccaccagcacccgaacctgggccctgcccacctacaacaatcacctctacaagcaaatctccaacagcacatctggaggatcttcaaatgacaacgcctacttcggctacagcaccccctgggggtattttgacttcaacagattccactgccacttctcaccacgtgactggcagcgactcatcaacaacaactggggattccggcctaagcgactcaacttcaagctcttcaacattcaggtcaaagaggttacggacaacaatggagtcaagaccatcgccaataaccttaccagcacggtccaggtcttcacggactcagactatcagctcccgtacgtgctcgggtcggctcacgagggctgcctcccgccgttcccagcggacgttttcatgattcctcagtacgggtatctgacgcttaatgatggaagccaggccgtgggtcgttcgtccttttactgcctggaatatttcccgtcgcaaatgctaagaacgggtaacaacttccagttcagctacgagtttgagaacgtacctttccatagcagctacgctcacagccaaagcctggaccgactaatgaatccactcatcgaccaatacttgtactatctctctagaactattaacggttctggacagaatcaacaaacgctaaaattcagtgtggccggacccagcaacatggctgtccagggaagaaactacatacctggacccagctaccgacaacaacgtgtctcaaccactgtgactcaaaacaacaacagcgaatttgcttggcctggagcttcttcttgggctctcaatggacgtaatagcttgatgaatcctggacctgctatggccagccacaaagaaggagaggaccgtttctttcctttgtctggatctttaatttttggcaaacaaggtaccggcagagacaacgtggatgcggacaaagtcatgataaccaacgaagaagaaattaaaactactaacccggtagcaacggagtcctatggacaagtggccacaaaccaccagagtgcccagccatccagtggcgacccacgcgcccaggcccagaccggttgggttcaaaaccaaggaatacttccgggtatggtttggcaggacagagatgtgtacctgcaaggacccatttgggccaaaattcctcacacggacggcaactttcacccttctccgctgatgggagggtttggaatgaagcacccgcctcctcagatcctcatcaaaaacacacctgtacctgcggatcctccaacggccttcaacaaggacaagctgaactctttcatcacccagtattctactggccaagtcagcgtggagatcgagtgggagctgcagaaggaaaacagcaagcgctggaacccggagatccagtacacttccaactattacaagtctaataatgttgaatttgctgttaatactgaaggtgtatatagtgaaccccgccccattggcaccagatacctgactcgtaatctg

SEQ ID NO: 229 - DNA, 2229 bp, Adeno-Associated Virus 9
  source 1..2229: mol_type = other DNA
atggctgccgatggttatcttccagattggctcgaggacaaccttagtgaaggaattcgcgagtggtgggctttgaaacctggagcccctcaacccaaggcaaatcaacaacatcaagacaacgctcgaggtcttgtgcttccgggttacaaataccttggacccggcaacggactcgacaagggggagccggtcaacgcagcagacgcggcggccctcgagcacgacaaggcctacgaccagcagctcaaggccggagacaacccgtacctcaagtacaaccacgccgacgccgagttccaggagcggctcaaagaagatacgtcttttgggggcaacctcgggcgagcagtcttccaggccaaaaagaggcttcttgaacctcttggtctggttgaggaagcggctaagacggctcctggaaagaagaggcctgtagagcagtctcctcaggaaccggactcctccgcgggtattggcaaatcgggtgcacagcccgctaaaaagagactcaatttcggtcagactggcgacacagagtcagtcccagaccctcaaccaatcggagaacctcccgcagccccctcaggtgtgggatctcttacaatggcttcaggtggtggcgcaccagtggcagacaataacgaaggtgccgatggagtgggtagttcctcgggaaattggcattgcgattcccaatggctgggggacagagtcatcaccaccagcacccgaacctgggccctgcccacctacaacaatcacctctacaagcaaatctccaacagcacatctggaggatcttcaaatgacaacgcctacttcggctacagcaccccctgggggtattttgacttcaacagattccactgccacttctcaccacgtgactggcagcgactcatcaacaacaactggggattccggcctaagcgactcaacttcaagctcttcaacattcaggtcaaagaggttacggacaacaatggagtcaagaccatcgccaataaccttaccagcacggtccaggtcttcacggactcagactatcagctcccgtacgtgctcgggtcggctcacgagggctgcctcccgccgttcccagcggacgttttcatgattcctcagtacgggtatctgacgcttaatgatggaagccaggccgtgggtcgttcgtccttttactgcctggaatatttcccgtcgcaaatgctaagaacgggtaacaacttccagttcagctacgagtttgagaacgtacctttccatagcagctacgctcacagccaaagcctggaccgactaatgaatccactcatcgaccaatacttgtactatctctctagaactattaacggttctggacagaatcaacaaacgctaaaattcagtgtggccggacccagcaacatggctgtccagggaagaaactacatacctggacccagctaccgacaacaacgtgtctcaaccactgtgactcaaaacaacaacagcgaatttgcttggcctggagcttcttcttgggctctcaatggacgtaatagcttgatgaatcctggacctgctatggccagccacaaagaaggagaggaccgtttctttcctttgtctggatctttaatttttggcaaacaaggtaccggcagagacaacgtggatgcggacaaagtcatgataaccaacgaagaagaaattaaaactactaacccggtagcaacggagtcctatggacaagtggccacaaaccaccagagtgcgcagccgtcaagcggcgacccgcgggctcaagcgcaaaccggttgggttcaaaaccaaggaatacttccgggtatggtttggcaggacagagatgtgtacctgcaaggacccatttgggccaaaattcctcacacggacggcaactttcacccttctccgctgatgggagggtttggaatgaagcacccgcctcctcagatcctcatcaaaaacacacctgtacctgcggatcctccaacggccttcaacaaggacaagctgaactctttcatcacccagtattctactggccaagtcagcgtggagatcgagtgggagctgcagaaggaaaacagcaagcgctggaacccggagatccagtacacttccaactattacaagtctaataatgttgaatttgctgttaatactgaaggtgtatatagtgaaccccgccccattggcaccagatacctgactcgtaatctg

SEQ ID NO: 230 - DNA, 2229 bp, Adeno-Associated Virus 9
  source 1..2229: mol_type = other DNA
atggctgccgatggttatcttccagattggctcgaggacaaccttagtgaaggaattcgcgagtggtgggctttgaaacctggagcccctcaacccaaggcaaatcaacaacatcaagacaacgctcgaggtcttgtgcttccgggttacaaataccttggacccggcaacggactcgacaagggggagccggtcaacgcagcagacgcggcggccctcgagcacgacaaggcctacgaccagcagctcaaggccggagacaacccgtacctcaagtacaaccacgccgacgccgagttccaggagcggctcaaagaagatacgtcttttgggggcaacctcgggcgagcagtcttccaggccaaaaagaggcttcttgaacctcttggtctggttgaggaagcggctaagacggctcctggaaagaagaggcctgtagagcagtctcctcaggaaccggactcctccgcgggtattggcaaatcgggtgcacagcccgctaaaaagagactcaatttcggtcagactggcgacacagagtcagtcccagaccctcaaccaatcggagaacctcccgcagccccctcaggtgtgggatctcttacaatggcttcaggtggtggcgcaccagtggcagacaataacgaaggtgccgatggagtgggtagttcctcgggaaattggcattgcgattcccaatggctgggggacagagtcatcaccaccagcacccgaacctgggccctgcccacctacaacaatcacctctacaagcaaatctccaacagcacatctggaggatcttcaaatgacaacgcctacttcggctacagcaccccctgggggtattttgacttcaacagattccactgccacttctcaccacgtgactggcagcgactcatcaacaacaactggggattccggcctaagcgactcaacttcaagctcttcaacattcaggtcaaagaggttacggacaacaatggagtcaagaccatcgccaataaccttaccagcacggtccaggtcttcacggactcagactatcagctcccgtacgtgctcgggtcggctcacgagggctgcctcccgccgttcccagcggacgttttcatgattcctcagtacgggtatctgacgcttaatgatggaagccaggccgtgggtcgttcgtccttttactgcctggaatatttcccgtcgcaaatgctaagaacgggtaacaacttccagttcagctacgagtttgagaacgtacctttccatagcagctacgctcacagccaaagcctggaccgactaatgaatccactcatcgaccaatacttgtactatctctctagaactattaacggttctggacagaatcaacaaacgctaaaattcagtgtggccggacccagcaacatggctgtccagggaagaaactacatacctggacccagctaccgacaacaacgtgtctcaaccactgtgactcaaaacaacaacagcgaatttgcttggcctggagcttcttcttgggctctcaatggacgtaatagcttgatgaatcctggacctgctatggccagccacaaagaaggagaggaccgtttctttcctttgtctggatctttaatttttggcaaacaaggtaccggcagagacaacgtggatgcggacaaagtcatgataaccaacgaagaagaaattaaaactactaacccggtagcaacggagtcctatggacaagtggccacaaaccaccagagtgcgcaaccaagtagcggtgacccgcgcgctcaggcacaaaccggttgggttcaaaaccaaggaatacttccgggtatggtttggcaggacagagatgtgtacctgcaaggacccatttgggccaaaattcctcacacggacggcaactttcacccttctccgctgatgggagggtttggaatgaagcacccgcctcctcagatcctcatcaaaaacacacctgtacctgcggatcctccaacggccttcaacaaggacaagctgaactctttcatcacccagtattctactggccaagtcagcgtggagatcgagtgggagctgcagaaggaaaacagcaagcgctggaacccggagatccagtacacttccaactattacaagtctaataatgttgaatttgctgttaatactgaaggtgtatatagtgaaccccgccccattggcaccagatacctgactcgtaatctg

SEQ ID NO: 231 - DNA, 2229 bp, Adeno-Associated Virus 9
  source 1..2229: mol_type = other DNA
atggctgccgatggttatcttccagattggctcgaggacaaccttagtgaaggaattcgcgagtggtgggctttgaaacctggagcccctcaacccaaggcaaatcaacaacatcaagacaacgctcgaggtcttgtgcttccgggttacaaataccttggacccggcaacggactcgacaagggggagccggtcaacgcagcagacgcggcggccctcgagcacgacaaggcctacgaccagcagctcaaggccggagacaacccgtacctcaagtacaaccacgccgacgccgagttccaggagcggctcaaagaagatacgtcttttgggggcaacctcgggcgagcagtcttccaggccaaaaagaggcttcttgaacctcttggtctggttgaggaagcggctaagacggctcctggaaagaagaggcctgtagagcagtctcctcaggaaccggactcctccgcgggtattggcaaatcgggtgcacagcccgctaaaaagagactcaatttcggtcagactggcgacacagagtcagtcccagaccctcaaccaatcggagaacctcccgcagccccctcaggtgtgggatctcttacaatggcttcaggtggtggcgcaccagtggcagacaataacgaaggtgccgatggagtgggtagttcctcgggaaattggcattgcgattcccaatggctgggggacagagtcatcaccaccagcacccgaacctgggccctgcccacctacaacaatcacctctacaagcaaatctccaacagcacatctggaggatcttcaaatgacaacgcctacttcggctacagcaccccctgggggtattttgacttcaacagattccactgccacttctcaccacgtgactggcagcgactcatcaacaacaactggggattccggcctaagcgactcaacttcaagctcttcaacattcaggtcaaagaggttacggacaacaatggagtcaagaccatcgccaataaccttaccagcacggtccaggtcttcacggactcagactatcagctcccgtacgtgctcgggtcggctcacgagggctgcctcccgccgttcccagcggacgttttcatgattcctcagtacgggtatctgacgcttaatgatggaagccaggccgtgggtcgttcgtccttttactgcctggaatatttcccgtcgcaaatgctaagaacgggtaacaacttccagttcagctacgagtttgagaacgtacctttccatagcagctacgctcacagccaaagcctggaccgactaatgaatccactcatcgaccaatacttgtactatctctctagaactattaacggttctggacagaatcaacaaacgctaaaattcagtgtggccggacccagcaacatggctgtccagggaagaaactacatacctggacccagctaccgacaacaacgtgtctcaaccactgtgactcaaaacaacaacagcgaatttgcttggcctggagcttcttcttgggctctcaatggacgtaatagcttgatgaatcctggacctgctatggccagccacaaagaaggagaggaccgtttctttcctttgtctggatctttaatttttggcaaacaaggtaccggcagagacaacgtggatgcggacaaagtcatgataaccaacgaagaagaaattaaaactactaacccggtagcaacggagtcctatggacaagtggccacaaaccaccagagtgcccagcaatcacgtgacttgtatagggctcaggcccagaccggttgggttcaaaaccaaggaatacttccgggtatggtttggcaggacagagatgtgtacctgcaaggacccatttgggccaaaattcctcacacggacggcaactttcacccttctccgctgatgggagggtttggaatgaagcacccgcctcctcagatcctcatcaaaaacacacctgtacctgcggatcctccaacggccttcaacaaggacaagctgaactctttcatcacccagtattctactggccaagtcagcgtggagatcgagtgggagctgcagaaggaaaacagcaagcgctggaacccggagatccagtacacttccaactattacaagtctaataatgttgaatttgctgttaatactgaaggtgtatatagtgaaccccgccccattggcaccagatacctgactcgtaatctg

SEQ ID NO: 232 - DNA, 2229 bp, Adeno-Associated Virus 9
  source 1..2229: mol_type = other DNA
atggctgccgatggttatcttccagattggctcgaggacaaccttagtgaaggaattcgcgagtggtgggctttgaaacctggagcccctcaacccaaggcaaatcaacaacatcaagacaacgctcgaggtcttgtgcttccgggttacaaataccttggacccggcaacggactcgacaagggggagccggtcaacgcagcagacgcggcggccctcgagcacgacaaggcctacgaccagcagctcaaggccggagacaacccgtacctcaagtacaaccacgccgacgccgagttccaggagcggctcaaagaagatacgtcttttgggggcaacctcgggcgagcagtcttccaggccaaaaagaggcttcttgaacctcttggtctggttgaggaagcggctaagacggctcctggaaagaagaggcctgtagagcagtctcctcaggaaccggactcctccgcgggtattggcaaatcgggtgcacagcccgctaaaaagagactcaatttcggtcagactggcgacacagagtcagtcccagaccctcaaccaatcggagaacctcccgcagccccctcaggtgtgggatctcttacaatggcttcaggtggtggcgcaccagtggcagacaataacgaaggtgccgatggagtgggtagttcctcgggaaattggcattgcgattcccaatggctgggggacagagtcatcaccaccagcacccgaacctgggccctgcccacctacaacaatcacctctacaagcaaatctccaacagcacatctggaggatcttcaaatgacaacgcctacttcggctacagcaccccctgggggtattttgacttcaacagattccactgccacttctcaccacgtgactggcagcgactcatcaacaacaactggggattccggcctaagcgactcaacttcaagctcttcaacattcaggtcaaagaggttacggacaacaatggagtcaagaccatcgccaataaccttaccagcacggtccaggtcttcacggactcagactatcagctcccgtacgtgctcgggtcggctcacgagggctgcctcccgccgttcccagcggacgttttcatgattcctcagtacgggtatctgacgcttaatgatggaagccaggccgtgggtcgttcgtccttttactgcctggaatatttcccgtcgcaaatgctaagaacgggtaacaacttccagttcagctacgagtttgagaacgtacctttccatagcagctacgctcacagccaaagcctggaccgactaatgaatccactcatcgaccaatacttgtactatctctctagaactattaacggttctggacagaatcaacaaacgctaaaattcagtgtggccggacccagcaacatggctgtccagggaagaaactacatacctggacccagctaccgacaacaacgtgtctcaaccactgtgactcaaaacaacaacagcgaatttgcttggcctggagcttcttcttgggctctcaatggacgtaatagcttgatgaatcctggacctgctatggccagccacaaagaaggagaggaccgtttctttcctttgtctggatctttaatttttggcaaacaaggtaccggcagagacaacgtggatgcggacaaagtcatgataaccaacgaagaagaaattaaaactactaacccggtagcaacggagtcctatggacaagtggccacaaaccaccagagtgcgcagcagtctagggacttgtaccgtgctcaagctcaaaccggttgggttcaaaaccaaggaatacttccgggtatggtttggcaggacagagatgtgtacctgcaaggacccatttgggccaaaattcctcacacggacggcaactttcacccttctccgctgatgggagggtttggaatgaagcacccgcctcctcagatcctcatcaaaaacacacctgtacctgcggatcctccaacggccttcaacaaggacaagctgaactctttcatcacccagtattctactggccaagtcagcgtggagatcgagtgggagctgcagaaggaaaacagcaagcgctggaacccggagatccagtacacttccaactattacaagtctaataatgttgaatttgctgttaatactgaaggtgtatatagtgaaccccgccccattggcaccagatacctgactcgtaatctg

SEQ ID NO: 233 - DNA, 2229 bp, Adeno-Associated Virus 9
  source 1..2229: mol_type = other DNA
atggctgccgatggttatcttccagattggctcgaggacaaccttagtgaaggaattcgcgagtggtgggctttgaaacctggagcccctcaacccaaggcaaatcaacaacatcaagacaacgctcgaggtcttgtgcttccgggttacaaataccttggacccggcaacggactcgacaagggggagccggtcaacgcagcagacgcggcggccctcgagcacgacaaggcctacgaccagcagctcaaggccggagacaacccgtacctcaagtacaaccacgccgacgccgagttccaggagcggctcaaagaagatacgtcttttgggggcaacctcgggcgagcagtcttccaggccaaaaagaggcttcttgaacctcttggtctggttgaggaagcggctaagacggctcctggaaagaagaggcctgtagagcagtctcctcaggaaccggactcctccgcgggtattggcaaatcgggtgcacagcccgctaaaaagagactcaatttcggtcagactggcgacacagagtcagtcccagaccctcaaccaatcggagaacctcccgcagccccctcaggtgtgggatctcttacaatggcttcaggtggtggcgcaccagtggcagacaataacgaaggtgccgatggagtgggtagttcctcgggaaattggcattgcgattcccaatggctgggggacagagtcatcaccaccagcacccgaacctgggccctgcccacctacaacaatcacctctacaagcaaatctccaacagcacatctggaggatcttcaaatgacaacgcctacttcggctacagcaccccctgggggtattttgacttcaacagattccactgccacttctcaccacgtgactggcagcgactcatcaacaacaactggggattccggcctaagcgactcaacttcaagctcttcaacattcaggtcaaagaggttacggacaacaatggagtcaagaccatcgccaataaccttaccagcacggtccaggtcttcacggactcagactatcagctcccgtacgtgctcgggtcggctcacgagggctgcctcccgccgttcccagcggacgttttcatgattcctcagtacgggtatctgacgcttaatgatggaagccaggccgtgggtcgttcgtccttttactgcctggaatatttcccgtcgcaaatgctaagaacgggtaacaacttccagttcagctacgagtttgagaacgtacctttccatagcagctacgctcacagccaaagcctggaccgactaatgaatccactcatcgaccaatacttgtactatctctctagaactattaacggttctggacagaatcaacaaacgctaaaattcagtgtggccggacccagcaacatggctgtccagggaagaaactacatacctggacccagctaccgacaacaacgtgtctcaaccactgtgactcaaaacaacaacagcgaatttgcttggcctggagcttcttcttgggctctcaatggacgtaatagcttgatgaatcctggacctgctatggccagccacaaagaaggagaggaccgtttctttcctttgtctggatctttaatttttggcaaacaaggtaccggcagagacaacgtggatgcggacaaagtcatgataaccaacgaagaagaaattaaaactactaacccggtagcaacggagtcctatggacaagtggccacaaaccaccagagtgctcagcaatcaagggacttgtatagggcgcaggcccaaaccggttgggttcaaaaccaaggaatacttccgggtatggtttggcaggacagagatgtgtacctgcaaggacccatttgggccaaaattcctcacacggacggcaactttcacccttctccgctgatgggagggtttggaatgaagcacccgcctcctcagatcctcatcaaaaacacacctgtacctgcggatcctccaacggccttcaacaaggacaagctgaactctttcatcacccagtattctactggccaagtcagcgtggagatcgagtgggagctgcagaaggaaaacagcaagcgctggaacccggagatccagtacacttccaactattacaagtctaataatgttgaatttgctgttaatactgaaggtgtatatagtgaaccccgccccattggcaccagatacctgactcgtaatctg

SEQ ID NO: 234 - DNA, 2229 bp, Adeno-Associated Virus 9
  source 1..2229: mol_type = other DNA
atggctgccgatggttatcttccagattggctcgaggacaaccttagtgaaggaattcgcgagtggtgggctttgaaacctggagcccctcaacccaaggcaaatcaacaacatcaagacaacgctcgaggtcttgtgcttccgggttacaaataccttggacccggcaacggactcgacaagggggagccggtcaacgcagcagacgcggcggccctcgagcacgacaaggcctacgaccagcagctcaaggccggagacaacccgtacctcaagtacaaccacgccgacgccgagttccaggagcggctcaaagaagatacgtcttttgggggcaacctcgggcgagcagtcttccaggccaaaaagaggcttcttgaacctcttggtctggttgaggaagcggctaagacggctcctggaaagaagaggcctgtagagcagtctcctcaggaaccggactcctccgcgggtattggcaaatcgggtgcacagcccgctaaaaagagactcaatttcggtcagactggcgacacagagtcagtcccagaccctcaaccaatcggagaacctcccgcagccccctcaggtgtgggatctcttacaatggcttcaggtggtggcgcaccagtggcagacaataacgaaggtgccgatggagtgggtagttcctcgggaaattggcattgcgattcccaatggctgggggacagagtcatcaccaccagcacccgaacctgggccctgcccacctacaacaatcacctctacaagcaaatctccaacagcacatctggaggatcttcaaatgacaacgcctacttcggctacagcaccccctgggggtattttgacttcaacagattccactgccacttctcaccacgtgactggcagcgactcatcaacaacaactggggattccggcctaagcgactcaacttcaagctcttcaacattcaggtcaaagaggttacggacaacaatggagtcaagaccatcgccaataaccttaccagcacggtccaggtcttcacggactcagactatcagctcccgtacgtgctcgggtcggctcacgagggctgcctcccgccgttcccagcggacgttttcatgattcctcagtacgggtatctgacgcttaatgatggaagccaggccgtgggtcgttcgtccttttactgcctggaatatttcccgtcgcaaatgctaagaacgggtaacaacttccagttcagctacgagtttgagaacgtacctttccatagcagctacgctcacagccaaagcctggaccgactaatgaatccactcatcgaccaatacttgtactatctctctagaactattaacggttctggacagaatcaacaaacgctaaaattcagtgtggccggacccagcaacatggctgtccagggaagaaactacatacctggacccagctaccgacaacaacgtgtctcaaccactgtgactcaaaacaacaacagcgaatttgcttggcctggagcttcttcttgggctctcaatggacgtaatagcttgatgaatcctggacctgctatggccagccacaaagaaggagaggaccgtttctttcctttgtctggatctttaatttttggcaaacaaggtaccggcagagacaacgtggatgcggacaaagtcatgataaccaacgaagaagaaattaaaactactaacccggtagcaacggagtcctatggacaagtggccacaaaccaccagagtgcccagcaatcccgtgatttgtacagagcacaagcacaaaccggttgggttcaaaaccaaggaatacttccgggtatggtttggcaggacagagatgtgtacctgcaaggacccatttgggccaaaattcctcacacggacggcaactttcacccttctccgctgatgggagggtttggaatgaagcacccgcctcctcagatcctcatcaaaaacacacctgtacctgcggatcctccaacggccttcaacaaggacaagctgaactctttcatcacccagtattctactggccaagtcagcgtggagatcgagtgggagctgcagaaggaaaacagcaagcgctggaacccggagatccagtacacttccaactattacaagtctaataatgttgaatttgctgttaatactgaaggtgtatatagtgaaccccgccccattggcaccagatacctgactcgtaatctg

SEQ ID NO: 235 - DNA, 2229 bp, Adeno-Associated Virus 9
  source 1..2229: mol_type = other DNA
atggctgccgatggttatcttccagattggctcgaggacaaccttagtgaaggaattcgcgagtggtgggctttgaaacctggagcccctcaacccaaggcaaatcaacaacatcaagacaacgctcgaggtcttgtgcttccgggttacaaataccttggacccggcaacggactcgacaagggggagccggtcaacgcagcagacgcggcggccctcgagcacgacaaggcctacgaccagcagctcaaggccggagacaacccgtacctcaagtacaaccacgccgacgccgagttccaggagcggctcaaagaagatacgtcttttgggggcaacctcgggcgagcagtcttccaggccaaaaagaggcttcttgaacctcttggtctggttgaggaagcggctaagacggctcctggaaagaagaggcctgtagagcagtctcctcaggaaccggactcctccgcgggtattggcaaatcgggtgcacagcccgctaaaaagagactcaatttcggtcagactggcgacacagagtcagtcccagaccctcaaccaatcggagaacctcccgcagccccctcaggtgtgggatctcttacaatggcttcaggtggtggcgcaccagtggcagacaataacgaaggtgccgatggagtgggtagttcctcgggaaattggcattgcgattcccaatggctgggggacagagtcatcaccaccagcacccgaacctgggccctgcccacctacaacaatcacctctacaagcaaatctccaacagcacatctggaggatcttcaaatgacaacgcctacttcggctacagcaccccctgggggtattttgacttcaacagattccactgccacttctcaccacgtgactggcagcgactcatcaacaacaactggggattccggcctaagcgactcaacttcaagctcttcaacattcaggtcaaagaggttacggacaacaatggagtcaagaccatcgccaataaccttaccagcacggtccaggtcttcacggactcagactatcagctcccgtacgtgctcgggtcggctcacgagggctgcctcccgccgttcccagcggacgttttcatgattcctcagtacgggtatctgacgcttaatgatggaagccaggccgtgggtcgttcgtccttttactgcctggaatatttcccgtcgcaaatgctaagaacgggtaacaacttccagttcagctacgagtttgagaacgtacctttccatagcagctacgctcacagccaaagcctggaccgactaatgaatccactcatcgaccaatacttgtactatctctctagaactattaacggttctggacagaatcaacaaacgctaaaattcagtgtggccggacccagcaacatggctgtccagggaagaaactacatacctggacccagctaccgacaacaacgtgtctcaaccactgtgactcaaaacaacaacagcgaatttgcttggcctggagcttcttcttgggctctcaatggacgtaatagcttgatgaatcctggacctgctatggccagccacaaagaaggagaggaccgtttctttcctttgtctggatctttaatttttggcaaacaaggtaccggcagagacaacgtggatgcggacaaagtcatgataaccaacgaagaagaaattaaaactactaacccggtagcaacggagtcctatggacaagtggccacaaaccaccagagtgcccaacaatcgcgggatctatatcgagcccaggcgcagaccggttgggttcaaaaccaaggaatacttccgggtatggtttggcaggacagagatgtgtacctgcaaggacccatttgggccaaaattcctcacacggacggcaactttcacccttctccgctgatgggagggtttggaatgaagcacccgcctcctcagatcctcatcaaaaacacacctgtacctgcggatcctccaacggccttcaacaaggacaagctgaactctttcatcacccagtattctactggccaagtcagcgtggagatcgagtgggagctgcagaaggaaaacagcaagcgctggaacccggagatccagtacacttccaactattacaagtctaataatgttgaatttgctgttaatactgaaggtgtatatagtgaaccccgccccattggcaccagatacctgactcgtaatctg

SEQ ID NO: 236 - DNA, 2229 bp, Adeno-Associated Virus 9
  source 1..2229: mol_type = other DNA
atggctgccgatggttatcttccagattggctcgaggacaaccttagtgaaggaattcgcgagtggtgggctttgaaacctggagcccctcaacccaaggcaaatcaacaacatcaagacaacgctcgaggtcttgtgcttccgggttacaaataccttggacccggcaacggactcgacaagggggagccggtcaacgcagcagacgcggcggccctcgagcacgacaaggcctacgaccagcagctcaaggccggagacaacccgtacctcaagtacaaccacgccgacgccgagttccaggagcggctcaaagaagatacgtcttttgggggcaacctcgggcgagcagtcttccaggccaaaaagaggcttcttgaacctcttggtctggttgaggaagcggctaagacggctcctggaaagaagaggcctgtagagcagtctcctcaggaaccggactcctccgcgggtattggcaaatcgggtgcacagcccgctaaaaagagactcaatttcggtcagactggcgacacagagtcagtcccagaccctcaaccaatcggagaacctcccgcagccccctcaggtgtgggatctcttacaatggcttcaggtggtggcgcaccagtggcagacaataacgaaggtgccgatggagtgggtagttcctcgggaaattggcattgcgattcccaatggctgggggacagagtcatcaccaccagcacccgaacctgggccctgcccacctacaacaatcacctctacaagcaaatctccaacagcacatctggaggatcttcaaatgacaacgcctacttcggctacagcaccccctgggggtattttgacttcaacagattccactgccacttctcaccacgtgactggcagcgactcatcaacaacaactggggattccggcctaagcgactcaacttcaagctcttcaacattcaggtcaaagaggttacggacaacaatggagtcaagaccatcgccaataaccttaccagcacggtccaggtcttcacggactcagactatcagctcccgtacgtgctcgggtcggctcacgagggctgcctcccgccgttcccagcggacgttttcatgattcctcagtacgggtatctgacgcttaatgatggaagccaggccgtgggtcgttcgtccttttactgcctggaatatttcccgtcgcaaatgctaagaacgggtaacaacttccagttcagctacgagtttgagaacgtacctttccatagcagctacgctcacagccaaagcctggaccgactaatgaatccactcatcgaccaatacttgtactatctctctagaactattaacggttctggacagaatcaacaaacgctaaaattcagtgtggccggacccagcaacatggctgtccagggaagaaactacatacctggacccagctaccgacaacaacgtgtctcaaccactgtgactcaaaacaacaacagcgaatttgcttggcctggagcttcttcttgggctctcaatggacgtaatagcttgatgaatcctggacctgctatggccagccacaaagaaggagaggaccgtttctttcctttgtctggatctttaatttttggcaaacaaggtaccggcagagacaacgtggatgcggacaaagtcatgataaccaacgaagaagaaattaaaactactaacccggtagcaacggagtcctatggacaagtggccacaaaccaccagagtgcgcaacagagcagagacctttatcgtgcccaggcgcagaccggttgggttcaaaaccaaggaatacttccgggtatggtttggcaggacagagatgtgtacctgcaaggacccatttgggccaaaattcctcacacggacggcaactttcacccttctccgctgatgggagggtttggaatgaagcacccgcctcctcagatcctcatcaaaaacacacctgtacctgcggatcctccaacggccttcaacaaggacaagctgaactctttcatcacccagtattctactggccaagtcagcgtggagatcgagtgggagctgcagaaggaaaacagcaagcgctggaacccggagatccagtacacttccaactattacaagtctaataatgttgaatttgctgttaatactgaaggtgtatatagtgaaccccgccccattggcaccagatacctgactcgtaatctg

SEQ ID NO: 237 - DNA, 2229 bp, Adeno-Associated Virus 9
  source 1..2229: mol_type = other DNA
atggctgccgatggttatcttccagattggctcgaggacaaccttagtgaaggaattcgcgagtggtgggctttgaaacctggagcccctcaacccaaggcaaatcaacaacatcaagacaacgctcgaggtcttgtgcttccgggttacaaataccttggacccggcaacggactcgacaagggggagccggtcaacgcagcagacgcggcggccctcgagcacgacaaggcctacgaccagcagctcaaggccggagacaacccgtacctcaagtacaaccacgccgacgccgagttccaggagcggctcaaagaagatacgtcttttgggggcaacctcgggcgagcagtcttccaggccaaaaagaggcttcttgaacctcttggtctggttgaggaagcggctaagacggctcctggaaagaagaggcctgtagagcagtctcctcaggaaccggactcctccgcgggtattggcaaatcgggtgcacagcccgctaaaaagagactcaatttcggtcagactggcgacacagagtcagtcccagaccctcaaccaatcggagaacctcccgcagccccctcaggtgtgggatctcttacaatggcttcaggtggtggcgcaccagtggcagacaataacgaaggtgccgatggagtgggtagttcctcgggaaattggcattgcgattcccaatggctgggggacagagtcatcaccaccagcacccgaacctgggccctgcccacctacaacaatcacctctacaagcaaatctccaacagcacatctggaggatcttcaaatgacaacgcctacttcggctacagcaccccctgggggtattttgacttcaacagattccactgccacttctcaccacgtgactggcagcgactcatcaacaacaactggggattccggcctaagcgactcaacttcaagctcttcaacattcaggtcaaagaggttacggacaacaatggagtcaagaccatcgccaataaccttaccagcacggtccaggtcttcacggactcagactatcagctcccgtacgtgctcgggtcggctcacgagggctgcctcccgccgttcccagcggacgttttcatgattcctcagtacgggtatctgacgcttaatgatggaagccaggccgtgggtcgttcgtccttttactgcctggaatatttcccgtcgcaaatgctaagaacgggtaacaacttccagttcagctacgagtttgagaacgtacctttccatagcagctacgctcacagccaaagcctggaccgactaatgaatccactcatcgaccaatacttgtactatctctctagaactattaacggttctggacagaatcaacaaacgctaaaattcagtgtggccggacccagcaacatggctgtccagggaagaaactacatacctggacccagctaccgacaacaacgtgtctcaaccactgtgactcaaaacaacaacagcgaatttgcttggcctggagcttcttcttgggctctcaatggacgtaatagcttgatgaatcctggacctgctatggccagccacaaagaaggagaggaccgtttctttcctttgtctggatctttaatttttggcaaacaaggtaccggcagagacaacgtggatgcggacaaagtcatgataaccaacgaagaagaaattaaaactactaacccggtagcaacggagtcctatggacaagtggccacaaaccaccagagtgcgcagcagtctcgagacctgtatcgtgcgcaagctcagaccggttgggttcaaaaccaaggaatacttccgggtatggtttggcaggacagagatgtgtacctgcaaggacccatttgggccaaaattcctcacacggacggcaactttcacccttctccgctgatgggagggtttggaatgaagcacccgcctcctcagatcctcatcaaaaacacacctgtacctgcggatcctccaacggccttcaacaaggacaagctgaactctttcatcacccagtattctactggccaagtcagcgtggagatcgagtgggagctgcagaaggaaaacagcaagcgctggaacccggagatccagtacacttccaactattacaagtctaataatgttgaatttgctgttaatactgaaggtgtatatagtgaaccccgccccattggcaccagatacctgactcgtaatctg

SEQ ID NO: 238 - DNA, 2229 bp, Adeno-Associated Virus 9
  source 1..2229: mol_type = other DNA
atggctgccgatggttatcttccagattggctcgaggacaaccttagtgaaggaattcgcgagtggtgggctttgaaacctggagcccctcaacccaaggcaaatcaacaacatcaagacaacgctcgaggtcttgtgcttccgggttacaaataccttggacccggcaacggactcgacaagggggagccggtcaacgcagcagacgcggcggccctcgagcacgacaaggcctacgaccagcagctcaaggccggagacaacccgtacctcaagtacaaccacgccgacgccgagttccaggagcggctcaaagaagatacgtcttttgggggcaacctcgggcgagcagtcttccaggccaaaaagaggcttcttgaacctcttggtctggttgaggaagcggctaagacggctcctggaaagaagaggcctgtagagcagtctcctcaggaaccggactcctccgcgggtattggcaaatcgggtgcacagcccgctaaaaagagactcaatttcggtcagactggcgacacagagtcagtcccagaccctcaaccaatcggagaacctcccgcagccccctcaggtgtgggatctcttacaatggcttcaggtggtggcgcaccagtggcagacaataacgaaggtgccgatggagtgggtagttcctcgggaaattggcattgcgattcccaatggctgggggacagagtcatcaccaccagcacccgaacctgggccctgcccacctacaacaatcacctctacaagcaaatctccaacagcacatctggaggatcttcaaatgacaacgcctacttcggctacagcaccccctgggggtattttgacttcaacagattccactgccacttctcaccacgtgactggcagcgactcatcaacaacaactggggattccggcctaagcgactcaacttcaagctcttcaacattcaggtcaaagaggttacggacaacaatggagtcaagaccatcgccaataaccttaccagcacggtccaggtcttcacggactcagactatcagctcccgtacgtgctcgggtcggctcacgagggctgcctcccgccgttcccagcggacgttttcatgattcctcagtacgggtatctgacgcttaatgatggaagccaggccgtgggtcgttcgtccttttactgcctggaatatttcccgtcgcaaatgctaagaacgggtaacaacttccagttcagctacgagtttgagaacgtacctttccatagcagctacgctcacagccaaagcctggaccgactaatgaatccactcatcgaccaatacttgtactatctctctagaactattaacggttctggacagaatcaacaaacgctaaaattcagtgtggccggacccagcaacatggctgtccagggaagaaactacatacctggacccagctaccgacaacaacgtgtctcaaccactgtgactcaaaacaacaacagcgaatttgcttggcctggagcttcttcttgggctctcaatggacgtaatagcttgatgaatcctggacctgctatggccagccacaaagaaggagaggaccgtttctttcctttgtctggatctttaatttttggcaaacaaggtaccggcagagacaacgtggatgcggacaaagtcatgataaccaacgaagaagaaattaaaactactaacccggtagcaacggagtcctatggacaagtggccacaaaccaccagagtgcccaacaatcacgcgatctttaccgcgcccaggcacaaaccggttgggttcaaaaccaaggaatacttccgggtatggtttggcaggacagagatgtgtacctgcaaggacccatttgggccaaaattcctcacacggacggcaactttcacccttctccgctgatgggagggtttggaatgaagcacccgcctcctcagatcctcatcaaaaacacacctgtacctgcggatcctccaacggccttcaacaaggacaagctgaactctttcatcacccagtattctactggccaagtcagcgtggagatcgagtgggagctgcagaaggaaaacagcaagcgctggaacccggagatccagtacacttccaactattacaagtctaataatgttgaatttgctgttaatactgaaggtgtatatagtgaaccccgccccattggcaccagatacctgactcgtaatctg

SEQ ID NO: 239 - DNA, 2229 bp, Adeno-Associated Virus 9
  source 1..2229: mol_type = other DNA
atggctgccgatggttatcttccagattggctcgaggacaaccttagtgaaggaattcgcgagtggtgggctttgaaacctggagcccctcaacccaaggcaaatcaacaacatcaagacaacgctcgaggtcttgtgcttccgggttacaaataccttggacccggcaacggactcgacaagggggagccggtcaacgcagcagacgcggcggccctcgagcacgacaaggcctacgaccagcagctcaaggccggagacaacccgtacctcaagtacaaccacgccgacgccgagttccaggagcggctcaaagaagatacgtcttttgggggcaacctcgggcgagcagtcttccaggccaaaaagaggcttcttgaacctcttggtctggttgaggaagcggctaagacggctcctggaaagaagaggcctgtagagcagtctcctcaggaaccggactcctccgcgggtattggcaaatcgggtgcacagcccgctaaaaagagactcaatttcggtcagactggcgacacagagtcagtcccagaccctcaaccaatcggagaacctcccgcagccccctcaggtgtgggatctcttacaatggcttcaggtggtggcgcaccagtggcagacaataacgaaggtgccgatggagtgggtagttcctcgggaaattggcattgcgattcccaatggctgggggacagagtcatcaccaccagcacccgaacctgggccctgcccacctacaacaatcacctctacaagcaaatctccaacagcacatctggaggatcttcaaatgacaacgcctacttcggctacagcaccccctgggggtattttgacttcaacagattccactgccacttctcaccacgtgactggcagcgactcatcaacaacaactggggattccggcctaagcgactcaacttcaagctcttcaacattcaggtcaaagaggttacggacaacaatggagtcaagaccatcgccaataaccttaccagcacggtccaggtcttcacggactcagactatcagctcccgtacgtgctcgggtcggctcacgagggctgcctcccgccgttcccagcggacgttttcatgattcctcagtacgggtatctgacgcttaatgatggaagccaggccgtgggtcgttcgtccttttactgcctggaatatttcccgtcgcaaatgctaagaacgggtaacaacttccagttcagctacgagtttgagaacgtacctttccatagcagctacgctcacagccaaagcctggaccgactaatgaatccactcatcgaccaatacttgtactatctctctagaactattaacggttctggacagaatcaacaaacgctaaaattcagtgtggccggacccagcaacatggctgtccagggaagaaactacatacctggacccagctaccgacaacaacgtgtctcaaccactgtgactcaaaacaacaacagcgaatttgcttggcctggagcttcttcttgggctctcaatggacgtaatagcttgatgaatcctggacctgctatggccagccacaaagaaggagaggaccgtttctttcctttgtctggatctttaatttttggcaaacaaggtaccggcagagacaacgtggatgcggacaaagtcatgataaccaacgaagaagaaattaaaactactaacccggtagcaacggagtcctatggacaagtggccacaaaccaccagagtgcacaacagtcgcgagatctgtaccgggcgcaagcgcaaaccggttgggttcaaaaccaaggaatacttccgggtatggtttggcaggacagagatgtgtacctgcaaggacccatttgggccaaaattcctcacacggacggcaactttcacccttctccgctgatgggagggtttggaatgaagcacccgcctcctcagatcctcatcaaaaacacacctgtacctgcggatcctccaacggccttcaacaaggacaagctgaactctttcatcacccagtattctactggccaagtcagcgtggagatcgagtgggagctgcagaaggaaaacagcaagcgctggaacccggagatccagtacacttccaactattacaagtctaataatgttgaatttgctgttaatactgaaggtgtatatagtgaaccccgccccattggcaccagatacctgactcgtaatctg

SEQ ID NO: 240 - DNA, 2229 bp, Adeno-Associated Virus 9
  source 1..2229: mol_type = other DNA
atggctgccgatggttatcttccagattggctcgaggacaaccttagtgaaggaattcgcgagtggtgggctttgaaacctggagcccctcaacccaaggcaaatcaacaacatcaagacaacgctcgaggtcttgtgcttccgggttacaaataccttggacccggcaacggactcgacaagggggagccggtcaacgcagcagacgcggcggccctcgagcacgacaaggcctacgaccagcagctcaaggccggagacaacccgtacctcaagtacaaccacgccgacgccgagttccaggagcggctcaaagaagatacgtcttttgggggcaacctcgggcgagcagtcttccaggccaaaaagaggcttcttgaacctcttggtctggttgaggaagcggctaagacggctcctggaaagaagaggcctgtagagcagtctcctcaggaaccggactcctccgcgggtattggcaaatcgggtgcacagcccgctaaaaagagactcaatttcggtcagactggcgacacagagtcagtcccagaccctcaaccaatcggagaacctcccgcagccccctcaggtgtgggatctcttacaatggcttcaggtggtggcgcaccagtggcagacaataacgaaggtgccgatggagtgggtagttcctcgggaaattggcattgcgattcccaatggctgggggacagagtcatcaccaccagcacccgaacctgggccctgcccacctacaacaatcacctctacaagcaaatctccaacagcacatctggaggatcttcaaatgacaacgcctacttcggctacagcaccccctgggggtattttgacttcaacagattccactgccacttctcaccacgtgactggcagcgactcatcaacaacaactggggattccggcctaagcgactcaacttcaagctcttcaacattcaggtcaaagaggttacggacaacaatggagtcaagaccatcgccaataaccttaccagcacggtccaggtcttcacggactcagactatcagctcccgtacgtgctcgggtcggctcacgagggctgcctcccgccgttcccagcggacgttttcatgattcctcagtacgggtatctgacgcttaatgatggaagccaggccgtgggtcgttcgtccttttactgcctggaatatttcccgtcgcaaatgctaagaacgggtaacaacttccagttcagctacgagtttgagaacgtacctttccatagcagctacgctcacagccaaagcctggaccgactaatgaatccactcatcgaccaatacttgtactatctctctagaactattaacggttctggacagaatcaacaaacgctaaaattcagtgtggccggacccagcaacatggctgtccagggaagaaactacatacctggacccagctaccgacaacaacgtgtctcaaccactgtgactcaaaacaacaacagcgaatttgcttggcctggagcttcttcttgggctctcaatggacgtaatagcttgatgaatcctggacctgctatggccagccacaaagaaggagaggaccgtttctttcctttgtctggatctttaatttttggcaaacaaggtaccggcagagacaacgtggatgcggacaaagtcatgataaccaacgaagaagaaattaaaactactaacccggtagcaacggagtcctatggacaagtggccacaaaccaccagagtgcacaacagagccgcgatttataccgggcccaagcacagaccggttgggttcaaaaccaaggaatacttccgggtatggtttggcaggacagagatgtgtacctgcaaggacccatttgggccaaaattcctcacacggacggcaactttcacccttctccgctgatgggagggtttggaatgaagcacccgcctcctcagatcctcatcaaaaacacacctgtacctgcggatcctccaacggccttcaacaaggacaagctgaactctttcatcacccagtattctactggccaagtcagcgtggagatcgagtgggagctgcagaaggaaaacagcaagcgctggaacccggagatccagtacacttccaactattacaagtctaataatgttgaatttgctgttaatactgaaggtgtatatagtgaaccccgccccattggcaccagatacctgactcgtaatctg

SEQ ID NO: 241 - DNA, 2229 bp, Adeno-Associated Virus 9
  source 1..2229: mol_type = other DNA
atggctgccgatggttatcttccagattggctcgaggacaaccttagtgaaggaattcgcgagtggtgggctttgaaacctggagcccctcaacccaaggcaaatcaacaacatcaagacaacgctcgaggtcttgtgcttccgggttacaaataccttggacccggcaacggactcgacaagggggagccggtcaacgcagcagacgcggcggccctcgagcacgacaaggcctacgaccagcagctcaaggccggagacaacccgtacctcaagtacaaccacgccgacgccgagttccaggagcggctcaaagaagatacgtcttttgggggcaacctcgggcgagcagtcttccaggccaaaaagaggcttcttgaacctcttggtctggttgaggaagcggctaagacggctcctggaaagaagaggcctgtagagcagtctcctcaggaaccggactcctccgcgggtattggcaaatcgggtgcacagcccgctaaaaagagactcaatttcggtcagactggcgacacagagtcagtcccagaccctcaaccaatcggagaacctcccgcagccccctcaggtgtgggatctcttacaatggcttcaggtggtggcgcaccagtggcagacaataacgaaggtgccgatggagtgggtagttcctcgggaaattggcattgcgattcccaatggctgggggacagagtcatcaccaccagcacccgaacctgggccctgcccacctacaacaatcacctctacaagcaaatctccaacagcacatctggaggatcttcaaatgacaacgcctacttcggctacagcaccccctgggggtattttgacttcaacagattccactgccacttctcaccacgtgactggcagcgactcatcaacaacaactggggattccggcctaagcgactcaacttcaagctcttcaacattcaggtcaaagaggttacggacaacaatggagtcaagaccatcgccaataaccttaccagcacggtccaggtcttcacggactcagactatcagctcccgtacgtgctcgggtcggctcacgagggctgcctcccgccgttcccagcggacgttttcatgattcctcagtacgggtatctgacgcttaatgatggaagccaggccgtgggtcgttcgtccttttactgcctggaatatttcccgtcgcaaatgctaagaacgggtaacaacttccagttcagctacgagtttgagaacgtacctttccatagcagctacgctcacagccaaagcctggaccgactaatgaatccactcatcgaccaatacttgtactatctctctagaactattaacggttctggacagaatcaacaaacgctaaaattcagtgtggccggacccagcaacatggctgtccagggaagaaactacatacctggacccagctaccgacaacaacgtgtctcaaccactgtgactcaaaacaacaacagcgaatttgcttggcctggagcttcttcttgggctctcaatggacgtaatagcttgatgaatcctggacctgctatggccagccacaaagaaggagaggaccgtttctttcctttgtctggatctttaatttttggcaaacaaggtaccggcagagacaacgtggatgcggacaaagtcatgataaccaacgaagaagaaattaaaactactaacccggtagcaacggagtcctatggacaagtggccacaaaccaccagagtgcgcaggtcaacacggtgcgcgagttcgctcaagcccagaccggttgggttcaaaaccaaggaatacttccgggtatggtttggcaggacagagatgtgtacctgcaaggacccatttgggccaaaattcctcacacggacggcaactttcacccttctccgctgatgggagggtttggaatgaagcacccgcctcctcagatcctcatcaaaaacacacctgtacctgcggatcctccaacggccttcaacaaggacaagctgaactctttcatcacccagtattctactggccaagtcagcgtggagatcgagtgggagctgcagaaggaaaacagcaagcgctggaacccggagatccagtacacttccaactattacaagtctaataatgttgaatttgctgttaatactgaaggtgtatatagtgaaccccgccccattggcaccagatacctgactcgtaatctg

SEQ ID NO: 242 - DNA, 2229 bp, Adeno-Associated Virus 9
  source 1..2229: mol_type = other DNA
atggctgccgatggttatcttccagattggctcgaggacaaccttagtgaaggaattcgcgagtggtgggctttgaaacctggagcccctcaacccaaggcaaatcaacaacatcaagacaacgctcgaggtcttgtgcttccgggttacaaataccttggacccggcaacggactcgacaagggggagccggtcaacgcagcagacgcggcggccctcgagcacgacaaggcctacgaccagcagctcaaggccggagacaacccgtacctcaagtacaaccacgccgacgccgagttccaggagcggctcaaagaagatacgtcttttgggggcaacctcgggcgagcagtcttccaggccaaaaagaggcttcttgaacctcttggtctggttgaggaagcggctaagacggctcctggaaagaagaggcctgtagagcagtctcctcaggaaccggactcctccgcgggtattggcaaatcgggtgcacagcccgctaaaaagagactcaatttcggtcagactggcgacacagagtcagtcccagaccctcaaccaatcggagaacctcccgcagccccctcaggtgtgggatctcttacaatggcttcaggtggtggcgcaccagtggcagacaataacgaaggtgccgatggagtgggtagttcctcgggaaattggcattgcgattcccaatggctgggggacagagtcatcaccaccagcacccgaacctgggccctgcccacctacaacaatcacctctacaagcaaatctccaacagcacatctggaggatcttcaaatgacaacgcctacttcggctacagcaccccctgggggtattttgacttcaacagattccactgccacttctcaccacgtgactggcagcgactcatcaacaacaactggggattccggcctaagcgactcaacttcaagctcttcaacattcaggtcaaagaggttacggacaacaatggagtcaagaccatcgccaataaccttaccagcacggtccaggtcttcacggactcagactatcagctcccgtacgtgctcgggtcggctcacgagggctgcctcccgccgttcccagcggacgttttcatgattcctcagtacgggtatctgacgcttaatgatggaagccaggccgtgggtcgttcgtccttttactgcctggaatatttcccgtcgcaaatgctaagaacgggtaacaacttccagttcagctacgagtttgagaacgtacctttccatagcagctacgctcacagccaaagcctggaccgactaatgaatccactcatcgaccaatacttgtactatctctctagaactattaacggttctggacagaatcaacaaacgctaaaattcagtgtggccggacccagcaacatggctgtccagggaagaaactacatacctggacccagctaccgacaacaacgtgtctcaaccactgtgactcaaaacaacaacagcgaatttgcttggcctggagcttcttcttgggctctcaatggacgtaatagcttgatgaatcctggacctgctatggccagccacaaagaaggagaggaccgtttctttcctttgtctggatctttaatttttggcaaacaaggtaccggcagagacaacgtggatgcggacaaagtcatgataaccaacgaagaagaaattaaaactactaacccggtagcaacggagtcctatggacaagtggccacaaaccaccagagtgcacaagtgaatactgtcagggaatttgcacaggcacaaaccggttgggttcaaaaccaaggaatacttccgggtatggtttggcaggacagagatgtgtacctgcaaggacccatttgggccaaaattcctcacacggacggcaactttcacccttctccgctgatgggagggtttggaatgaagcacccgcctcctcagatcctcatcaaaaacacacctgtacctgcggatcctccaacggccttcaacaaggacaagctgaactctttcatcacccagtattctactggccaagtcagcgtggagatcgagtgggagctgcagaaggaaaacagcaagcgctggaacccggagatccagtacacttccaactattacaagtctaataatgttgaatttgctgttaatactgaaggtgtatatagtgaaccccgccccattggcaccagatacctgactcgtaatctg

SEQ ID NO: 243 - DNA, 2229 bp, Adeno-Associated Virus 9
  source 1..2229: mol_type = other DNA
atggctgccgatggttatcttccagattggctcgaggacaaccttagtgaaggaattcgcgagtggtgggctttgaaacctggagcccctcaacccaaggcaaatcaacaacatcaagacaacgctcgaggtcttgtgcttccgggttacaaataccttggacccggcaacggactcgacaagggggagccggtcaacgcagcagacgcggcggccctcgagcacgacaaggcctacgaccagcagctcaaggccggagacaacccgtacctcaagtacaaccacgccgacgccgagttccaggagcggctcaaagaagatacgtcttttgggggcaacctcgggcgagcagtcttccaggccaaaaagaggcttcttgaacctcttggtctggttgaggaagcggctaagacggctcctggaaagaagaggcctgtagagcagtctcctcaggaaccggactcctccgcgggtattggcaaatcgggtgcacagcccgctaaaaagagactcaatttcggtcagactggcgacacagagtcagtcccagaccctcaaccaatcggagaacctcccgcagccccctcaggtgtgggatctcttacaatggcttcaggtggtggcgcaccagtggcagacaataacgaaggtgccgatggagtgggtagttcctcgggaaattggcattgcgattcccaatggctgggggacagagtcatcaccaccagcacccgaacctgggccctgcccacctacaacaatcacctctacaagcaaatctccaacagcacatctggaggatcttcaaatgacaacgcctacttcggctacagcaccccctgggggtattttgacttcaacagattccactgccacttctcaccacgtgactggcagcgactcatcaacaacaactggggattccggcctaagcgactcaacttcaagctcttcaacattcaggtcaaagaggttacggacaacaatggagtcaagaccatcgccaataaccttaccagcacggtccaggtcttcacggactcagactatcagctcccgtacgtgctcgggtcggctcacgagggctgcctcccgccgttcccagcggacgttttcatgattcctcagtacgggtatctgacgcttaatgatggaagccaggccgtgggtcgttcgtccttttactgcctggaatatttcccgtcgcaaatgctaagaacgggtaacaacttccagttcagctacgagtttgagaacgtacctttccatagcagctacgctcacagccaaagcctggaccgactaatgaatccactcatcgaccaatacttgtactatctctctagaactattaacggttctggacagaatcaacaaacgctaaaattcagtgtggccggacccagcaacatggctgtccagggaagaaactacatacctggacccagctaccgacaacaacgtgtctcaaccactgtgactcaaaacaacaacagcgaatttgcttggcctggagcttcttcttgggctctcaatggacgtaatagcttgatgaatcctggacctgctatggccagccacaaagaaggagaggaccgtttctttcctttgtctggatctttaatttttggcaaacaaggtaccggcagagacaacgtggatgcggacaaagtcatgataaccaacgaagaagaaattaaaactactaacccggtagcaacggagtcctatggacaagtggccacaaaccaccagagtgcgcaagttaacactgtaagagagtttgcacaggctcaaaccggttgggttcaaaaccaaggaatacttccgggtatggtttggcaggacagagatgtgtacctgcaaggacccatttgggccaaaattcctcacacggacggcaactttcacccttctccgctgatgggagggtttggaatgaagcacccgcctcctcagatcctcatcaaaaacacacctgtacctgcggatcctccaacggccttcaacaaggacaagctgaactctttcatcacccagtattctactggccaagtcagcgtggagatcgagtgggagctgcagaaggaaaacagcaagcgctggaacccggagatccagtacacttccaactattacaagtctaataatgttgaatttgctgttaatactgaaggtgtatatagtgaaccccgccccattggcaccagatacctgactcgtaatctg

SEQ ID NO: 244 - DNA, 2229 bp, Adeno-Associated Virus 9
  source 1..2229: mol_type = other DNA
atggctgccgatggttatcttccagattggctcgaggacaaccttagtgaaggaattcgcgagtggtgggctttgaaacctggagcccctcaacccaaggcaaatcaacaacatcaagacaacgctcgaggtcttgtgcttccgggttacaaataccttggacccggcaacggactcgacaagggggagccggtcaacgcagcagacgcggcggccctcgagcacgacaaggcctacgaccagcagctcaaggccggagacaacccgtacctcaagtacaaccacgccgacgccgagttccaggagcggctcaaagaagatacgtcttttgggggcaacctcgggcgagcagtcttccaggccaaaaagaggcttcttgaacctcttggtctggttgaggaagcggctaagacggctcctggaaagaagaggcctgtagagcagtctcctcaggaaccggactcctccgcgggtattggcaaatcgggtgcacagcccgctaaaaagagactcaatttcggtcagactggcgacacagagtcagtcccagaccctcaaccaatcggagaacctcccgcagccccctcaggtgtgggatctcttacaatggcttcaggtggtggcgcaccagtggcagacaataacgaaggtgccgatggagtgggtagttcctcgggaaattggcattgcgattcccaatggctgggggacagagtcatcaccaccagcacccgaacctgggccctgcccacctacaacaatcacctctacaagcaaatctccaacagcacatctggaggatcttcaaatgacaacgcctacttcggctacagcaccccctgggggtattttgacttcaacagattccactgccacttctcaccacgtgactggcagcgactcatcaacaacaactggggattccggcctaagcgactcaacttcaagctcttcaacattcaggtcaaagaggttacggacaacaatggagtcaagaccatcgccaataaccttaccagcacggtccaggtcttcacggactcagactatcagctcccgtacgtgctcgggtcggctcacgagggctgcctcccgccgttcccagcggacgttttcatgattcctcagtacgggtatctgacgcttaatgatggaagccaggccgtgggtcgttcgtccttttactgcctggaatatttcccgtcgcaaatgctaagaacgggtaacaacttccagttcagctacgagtttgagaacgtacctttccatagcagctacgctcacagccaaagcctggaccgactaatgaatccactcatcgaccaatacttgtactatctctctagaactattaacggttctggacagaatcaacaaacgctaaaattcagtgtggccggacccagcaacatggctgtccagggaagaaactacatacctggacccagctaccgacaacaacgtgtctcaaccactgtgactcaaaacaacaacagcgaatttgcttggcctggagcttcttcttgggctctcaatggacgtaatagcttgatgaatcctggacctgctatggccagccacaaagaaggagaggaccgtttctttcctttgtctggatctttaatttttggcaaacaaggtaccggcagagacaacgtggatgcggacaaagtcatgataaccaacgaagaagaaattaaaactactaacccggtagcaacggagtcctatggacaagtggccacaaaccaccagagtgcccaggttaacacggtacgggagtttgcacaagcccagaccggttgggttcaaaaccaaggaatacttccgggtatggtttggcaggacagagatgtgtacctgcaaggacccatttgggccaaaattcctcacacggacggcaactttcacccttctccgctgatgggagggtttggaatgaagcacccgcctcctcagatcctcatcaaaaacacacctgtacctgcggatcctccaacggccttcaacaaggacaagctgaactctttcatcacccagtattctactggccaagtcagcgtggagatcgagtgggagctgcagaaggaaaacagcaagcgctggaacccggagatccagtacacttccaactattacaagtctaataatgttgaatttgctgttaatactgaaggtgtatatagtgaaccccgccccattggcaccagatacctgactcgtaatctg

SEQ ID NO: 245 - DNA, 2229 bp, Adeno-Associated Virus 9
  source 1..2229: mol_type = other DNA
atggctgccgatggttatcttccagattggctcgaggacaaccttagtgaaggaattcgcgagtggtgggctttgaaacctggagcccctcaacccaaggcaaatcaacaacatcaagacaacgctcgaggtcttgtgcttccgggttacaaataccttggacccggcaacggactcgacaagggggagccggtcaacgcagcagacgcggcggccctcgagcacgacaaggcctacgaccagcagctcaaggccggagacaacccgtacctcaagtacaaccacgccgacgccgagttccaggagcggctcaaagaagatacgtcttttgggggcaacctcgggcgagcagtcttccaggccaaaaagaggcttcttgaacctcttggtctggttgaggaagcggctaagacggctcctggaaagaagaggcctgtagagcagtctcctcaggaaccggactcctccgcgggtattggcaaatcgggtgcacagcccgctaaaaagagactcaatttcggtcagactggcgacacagagtcagtcccagaccctcaaccaatcggagaacctcccgcagccccctcaggtgtgggatctcttacaatggcttcaggtggtggcgcaccagtggcagacaataacgaaggtgccgatggagtgggtagttcctcgggaaattggcattgcgattcccaatggctgggggacagagtcatcaccaccagcacccgaacctgggccctgcccacctacaacaatcacctctacaagcaaatctccaacagcacatctggaggatcttcaaatgacaacgcctacttcggctacagcaccccctgggggtattttgacttcaacagattccactgccacttctcaccacgtgactggcagcgactcatcaacaacaactggggattccggcctaagcgactcaacttcaagctcttcaacattcaggtcaaagaggttacggacaacaatggagtcaagaccatcgccaataaccttaccagcacggtccaggtcttcacggactcagactatcagctcccgtacgtgctcgggtcggctcacgagggctgcctcccgccgttcccagcggacgttttcatgattcctcagtacgggtatctgacgcttaatgatggaagccaggccgtgggtcgttcgtccttttactgcctggaatatttcccgtcgcaaatgctaagaacgggtaacaacttccagttcagctacgagtttgagaacgtacctttccatagcagctacgctcacagccaaagcctggaccgactaatgaatccactcatcgaccaatacttgtactatctctctagaactattaacggttctggacagaatcaacaaacgctaaaattcagtgtggccggacccagcaacatggctgtccagggaagaaactacatacctggacccagctaccgacaacaacgtgtctcaaccactgtgactcaaaacaacaacagcgaatttgcttggcctggagcttcttcttgggctctcaatggacgtaatagcttgatgaatcctggacctgctatggccagccacaaagaaggagaggaccgtttctttcctttgtctggatctttaatttttggcaaacaaggtaccggcagagacaacgtggatgcggacaaagtcatgataaccaacgaagaagaaattaaaactactaacccggtagcaacggagtcctatggacaagtggccacaaaccaccagagtgcgcaggtgaacaccgtaagggagttcgcccaagcccagaccggttgggttcaaaaccaaggaatacttccgggtatggtttggcaggacagagatgtgtacctgcaaggacccatttgggccaaaattcctcacacggacggcaactttcacccttctccgctgatgggagggtttggaatgaagcacccgcctcctcagatcctcatcaaaaacacacctgtacctgcggatcctccaacggccttcaacaaggacaagctgaactctttcatcacccagtattctactggccaagtcagcgtggagatcgagtgggagctgcagaaggaaaacagcaagcgctggaacccggagatccagtacacttccaactattacaagtctaataatgttgaatttgctgttaatactgaaggtgtatatagtgaaccccgccccattggcaccagatacctgactcgtaatctg

SEQ ID NO: 246 - DNA, 2229 bp, Adeno-Associated Virus 9
  source 1..2229: mol_type = other DNA
atggctgccgatggttatcttccagattggctcgaggacaaccttagtgaaggaattcgcgagtggtgggctttgaaacctggagcccctcaacccaaggcaaatcaacaacatcaagacaacgctcgaggtcttgtgcttccgggttacaaataccttggacccggcaacggactcgacaagggggagccggtcaacgcagcagacgcggcggccctcgagcacgacaaggcctacgaccagcagctcaaggccggagacaacccgtacctcaagtacaaccacgccgacgccgagttccaggagcggctcaaagaagatacgtcttttgggggcaacctcgggcgagcagtcttccaggccaaaaagaggcttcttgaacctcttggtctggttgaggaagcggctaagacggctcctggaaagaagaggcctgtagagcagtctcctcaggaaccggactcctccgcgggtattggcaaatcgggtgcacagcccgctaaaaagagactcaatttcggtcagactggcgacacagagtcagtcccagaccctcaaccaatcggagaacctcccgcagccccctcaggtgtgggatctcttacaatggcttcaggtggtggcgcaccagtggcagacaataacgaaggtgccgatggagtgggtagttcctcgggaaattggcattgcgattcccaatggctgggggacagagtcatcaccaccagcacccgaacctgggccctgcccacctacaacaatcacctctacaagcaaatctccaacagcacatctggaggatcttcaaatgacaacgcctacttcggctacagcaccccctgggggtattttgacttcaacagattccactgccacttctcaccacgtgactggcagcgactcatcaacaacaactggggattccggcctaagcgactcaacttcaagctcttcaacattcaggtcaaagaggttacggacaacaatggagtcaagaccatcgccaataaccttaccagcacggtccaggtcttcacggactcagactatcagctcccgtacgtgctcgggtcggctcacgagggctgcctcccgccgttcccagcggacgttttcatgattcctcagtacgggtatctgacgcttaatgatggaagccaggccgtgggtcgttcgtccttttactgcctggaatatttcccgtcgcaaatgctaagaacgggtaacaacttccagttcagctacgagtttgagaacgtacctttccatagcagctacgctcacagccaaagcctggaccgactaatgaatccactcatcgaccaatacttgtactatctctctagaactattaacggttctggacagaatcaacaaacgctaaaattcagtgtggccggacccagcaacatggctgtccagggaagaaactacatacctggacccagctaccgacaacaacgtgtctcaaccactgtgactcaaaacaacaacagcgaatttgcttggcctggagcttcttcttgggctctcaatggacgtaatagcttgatgaatcctggacctgctatggccagccacaaagaaggagaggaccgtttctttcctttgtctggatctttaatttttggcaaacaaggtaccggcagagacaacgtggatgcggacaaagtcatgataaccaacgaagaagaaattaaaactactaacccggtagcaacggagtcctatggacaagtggccacaaaccaccagagtgctcaggtgaatacagtcagggaattcgcgcaagcacagaccggttgggttcaaaaccaaggaatacttccgggtatggtttggcaggacagagatgtgtacctgcaaggacccatttgggccaaaattcctcacacggacggcaactttcacccttctccgctgatgggagggtttggaatgaagcacccgcctcctcagatcctcatcaaaaacacacctgtacctgcggatcctccaacggccttcaacaaggacaagctgaactctttcatcacccagtattctactggccaagtcagcgtggagatcgagtgggagctgcagaaggaaaacagcaagcgctggaacccggagatccagtacacttccaactattacaagtctaataatgttgaatttgctgttaatactgaaggtgtatatagtgaaccccgccccattggcaccagatacctgactcgtaatctg

SEQ ID NO: 247 - DNA, 2229 bp, Adeno-Associated Virus 9
  source 1..2229: mol_type = other DNA
atggctgccgatggttatcttccagattggctcgaggacaaccttagtgaaggaattcgcgagtggtgggctttgaaacctggagcccctcaacccaaggcaaatcaacaacatcaagacaacgctcgaggtcttgtgcttccgggttacaaataccttggacccggcaacggactcgacaagggggagccggtcaacgcagcagacgcggcggccctcgagcacgacaaggcctacgaccagcagctcaaggccggagacaacccgtacctcaagtacaaccacgccgacgccgagttccaggagcggctcaaagaagatacgtcttttgggggcaacctcgggcgagcagtcttccaggccaaaaagaggcttcttgaacctcttggtctggttgaggaagcggctaagacggctcctggaaagaagaggcctgtagagcagtctcctcaggaaccggactcctccgcgggtattggcaaatcgggtgcacagcccgctaaaaagagactcaatttcggtcagactggcgacacagagtcagtcccagaccctcaaccaatcggagaacctcccgcagccccctcaggtgtgggatctcttacaatggcttcaggtggtggcgcaccagtggcagacaataacgaaggtgccgatggagtgggtagttcctcgggaaattggcattgcgattcccaatggctgggggacagagtcatcaccaccagcacccgaacctgggccctgcccacctacaacaatcacctctacaagcaaatctccaacagcacatctggaggatcttcaaatgacaacgcctacttcggctacagcaccccctgggggtattttgacttcaacagattccactgccacttctcaccacgtgactggcagcgactcatcaacaacaactggggattccggcctaagcgactcaacttcaagctcttcaacattcaggtcaaagaggttacggacaacaatggagtcaagaccatcgccaataaccttaccagcacggtccaggtcttcacggactcagactatcagctcccgtacgtgctcgggtcggctcacgagggctgcctcccgccgttcccagcggacgttttcatgattcctcagtacgggtatctgacgcttaatgatggaagccaggccgtgggtcgttcgtccttttactgcctggaatatttcccgtcgcaaatgctaagaacgggtaacaacttccagttcagctacgagtttgagaacgtacctttccatagcagctacgctcacagccaaagcctggaccgactaatgaatccactcatcgaccaatacttgtactatctctctagaactattaacggttctggacagaatcaacaaacgctaaaattcagtgtggccggacccagcaacatggctgtccagggaagaaactacatacctggacccagctaccgacaacaacgtgtctcaaccactgtgactcaaaacaacaacagcgaatttgcttggcctggagcttcttcttgggctctcaatggacgtaatagcttgatgaatcctggacctgctatggccagccacaaagaaggagaggaccgtttctttcctttgtctggatctttaatttttggcaaacaaggtaccggcagagacaacgtggatgcggacaaagtcatgataaccaacgaagaagaaattaaaactactaacccggtagcaacggagtcctatggacaagtggccacaaaccaccagagtgcacaagtaaatacagttcgcgaatttgctcaggcacaaaccggttgggttcaaaaccaaggaatacttccgggtatggtttggcaggacagagatgtgtacctgcaaggacccatttgggccaaaattcctcacacggacggcaactttcacccttctccgctgatgggagggtttggaatgaagcacccgcctcctcagatcctcatcaaaaacacacctgtacctgcggatcctccaacggccttcaacaaggacaagctgaactctttcatcacccagtattctactggccaagtcagcgtggagatcgagtgggagctgcagaaggaaaacagcaagcgctggaacccggagatccagtacacttccaactattacaagtctaataatgttgaatttgctgttaatactgaaggtgtatatagtgaaccccgccccattggcaccagatacctgactcgtaatctg

SEQ ID NO: 248 - DNA, 2229 bp, Adeno-Associated Virus 9
  source 1..2229: mol_type = other DNA
atggctgccgatggttatcttccagattggctcgaggacaaccttagtgaaggaattcgcgagtggtgggctttgaaacctggagcccctcaacccaaggcaaatcaacaacatcaagacaacgctcgaggtcttgtgcttccgggttacaaataccttggacccggcaacggactcgacaagggggagccggtcaacgcagcagacgcggcggccctcgagcacgacaaggcctacgaccagcagctcaaggccggagacaacccgtacctcaagtacaaccacgccgacgccgagttccaggagcggctcaaagaagatacgtcttttgggggcaacctcgggcgagcagtcttccaggccaaaaagaggcttcttgaacctcttggtctggttgaggaagcggctaagacggctcctggaaagaagaggcctgtagagcagtctcctcaggaaccggactcctccgcgggtattggcaaatcgggtgcacagcccgctaaaaagagactcaatttcggtcagactggcgacacagagtcagtcccagaccctcaaccaatcggagaacctcccgcagccccctcaggtgtgggatctcttacaatggcttcaggtggtggcgcaccagtggcagacaataacgaaggtgccgatggagtgggtagttcctcgggaaattggcattgcgattcccaatggctgggggacagagtcatcaccaccagcacccgaacctgggccctgcccacctacaacaatcacctctacaagcaaatctccaacagcacatctggaggatcttcaaatgacaacgcctacttcggctacagcaccccctgggggtattttgacttcaacagattccactgccacttctcaccacgtgactggcagcgactcatcaacaacaactggggattccggcctaagcgactcaacttcaagctcttcaacattcaggtcaaagaggttacggacaacaatggagtcaagaccatcgccaataaccttaccagcacggtccaggtcttcacggactcagactatcagctcccgtacgtgctcgggtcggctcacgagggctgcctcccgccgttcccagcggacgttttcatgattcctcagtacgggtatctgacgcttaatgatggaagccaggccgtgggtcgttcgtccttttactgcctggaatatttcccgtcgcaaatgctaagaacgggtaacaacttccagttcagctacgagtttgagaacgtacctttccatagcagctacgctcacagccaaagcctggaccgactaatgaatccactcatcgaccaatacttgtactatctctctagaactattaacggttctggacagaatcaacaaacgctaaaattcagtgtggccggacccagcaacatggctgtccagggaagaaactacatacctggacccagctaccgacaacaacgtgtctcaaccactgtgactcaaaacaacaacagcgaatttgcttggcctggagcttcttcttgggctctcaatggacgtaatagcttgatgaatcctggacctgctatggccagccacaaagaaggagaggaccgtttctttcctttgtctggatctttaatttttggcaaacaaggtaccggcagagacaacgtggatgcggacaaagtcatgataaccaacgaagaagaaattaaaactactaacccggtagcaacggagtcctatggacaagtggccacaaaccaccagagtgcacaggtaaacacagtgagggaatttgcacaggctcaaaccggttgggttcaaaaccaaggaatacttccgggtatggtttggcaggacagagatgtgtacctgcaaggacccatttgggccaaaattcctcacacggacggcaactttcacccttctccgctgatgggagggtttggaatgaagcacccgcctcctcagatcctcatcaaaaacacacctgtacctgcggatcctccaacggccttcaacaaggacaagctgaactctttcatcacccagtattctactggccaagtcagcgtggagatcgagtgggagctgcagaaggaaaacagcaagcgctggaacccggagatccagtacacttccaactattacaagtctaataatgttgaatttgctgttaatactgaaggtgtatatagtgaaccccgccccattggcaccagatacctgactcgtaatctg

SEQ ID NO: 249 - DNA, 2229 bp, Adeno-Associated Virus 9
  source 1..2229: mol_type = other DNA
atggctgccgatggttatcttccagattggctcgaggacaaccttagtgaaggaattcgcgagtggtgggctttgaaacctggagcccctcaacccaaggcaaatcaacaacatcaagacaacgctcgaggtcttgtgcttccgggttacaaataccttggacccggcaacggactcgacaagggggagccggtcaacgcagcagacgcggcggccctcgagcacgacaaggcctacgaccagcagctcaaggccggagacaacccgtacctcaagtacaaccacgccgacgccgagttccaggagcggctcaaagaagatacgtcttttgggggcaacctcgggcgagcagtcttccaggccaaaaagaggcttcttgaacctcttggtctggttgaggaagcggctaagacggctcctggaaagaagaggcctgtagagcagtctcctcaggaaccggactcctccgcgggtattggcaaatcgggtgcacagcccgctaaaaagagactcaatttcggtcagactggcgacacagagtcagtcccagaccctcaaccaatcggagaacctcccgcagccccctcaggtgtgggatctcttacaatggcttcaggtggtggcgcaccagtggcagacaataacgaaggtgccgatggagtgggtagttcctcgggaaattggcattgcgattcccaatggctgggggacagagtcatcaccaccagcacccgaacctgggccctgcccacctacaacaatcacctctacaagcaaatctccaacagcacatctggaggatcttcaaatgacaacgcctacttcggctacagcaccccctgggggtattttgacttcaacagattccactgccacttctcaccacgtgactggcagcgactcatcaacaacaactggggattccggcctaagcgactcaacttcaagctcttcaacattcaggtcaaagaggttacggacaacaatggagtcaagaccatcgccaataaccttaccagcacggtccaggtcttcacggactcagactatcagctcccgtacgtgctcgggtcggctcacgagggctgcctcccgccgttcccagcggacgttttcatgattcctcagtacgggtatctgacgcttaatgatggaagccaggccgtgggtcgttcgtccttttactgcctggaatatttcccgtcgcaaatgctaagaacgggtaacaacttccagttcagctacgagtttgagaacgtacctttccatagcagctacgctcacagccaaagcctggaccgactaatgaatccactcatcgaccaatacttgtactatctctctagaactattaacggttctggacagaatcaacaaacgctaaaattcagtgtggccggacccagcaacatggctgtccagggaagaaactacatacctggacccagctaccgacaacaacgtgtctcaaccactgtgactcaaaacaacaacagcgaatttgcttggcctggagcttcttcttgggctctcaatggacgtaatagcttgatgaatcctggacctgctatggccagccacaaagaaggagaggaccgtttctttcctttgtctggatctttaatttttggcaaacaaggtaccggcagagacaacgtggatgcggacaaagtcatgataaccaacgaagaagaaattaaaactactaacccggtagcaacggagtcctatggacaagtggccacaaaccaccagagtgctcaagtcaatacggtacgtgagttcgcgcaagcacagaccggttgggttcaaaaccaaggaatacttccgggtatggtttggcaggacagagatgtgtacctgcaaggacccatttgggccaaaattcctcacacggacggcaactttcacccttctccgctgatgggagggtttggaatgaagcacccgcctcctcagatcctcatcaaaaacacacctgtacctgcggatcctccaacggccttcaacaaggacaagctgaactctttcatcacccagtattctactggccaagtcagcgtggagatcgagtgggagctgcagaaggaaaacagcaagcgctggaacccggagatccagtacacttccaactattacaagtctaataatgttgaatttgctgttaatactgaaggtgtatatagtgaaccccgccccattggcaccagatacctgactcgtaatctg

SEQ ID NO: 250 - DNA, 2229 bp, Adeno-Associated Virus 9
  source 1..2229: mol_type = other DNA
atggctgccgatggttatcttccagattggctcgaggacaaccttagtgaaggaattcgcgagtggtgggctttgaaacctggagcccctcaacccaaggcaaatcaacaacatcaagacaacgctcgaggtcttgtgcttccgggttacaaataccttggacccggcaacggactcgacaagggggagccggtcaacgcagcagacgcggcggccctcgagcacgacaaggcctacgaccagcagctcaaggccggagacaacccgtacctcaagtacaaccacgccgacgccgagttccaggagcggctcaaagaagatacgtcttttgggggcaacctcgggcgagcagtcttccaggccaaaaagaggcttcttgaacctcttggtctggttgaggaagcggctaagacggctcctggaaagaagaggcctgtagagcagtctcctcaggaaccggactcctccgcgggtattggcaaatcgggtgcacagcccgctaaaaagagactcaatttcggtcagactggcgacacagagtcagtcccagaccctcaaccaatcggagaacctcccgcagccccctcaggtgtgggatctcttacaatggcttcaggtggtggcgcaccagtggcagacaataacgaaggtgccgatggagtgggtagttcctcgggaaattggcattgcgattcccaatggctgggggacagagtcatcaccaccagcacccgaacctgggccctgcccacctacaacaatcacctctacaagcaaatctccaacagcacatctggaggatcttcaaatgacaacgcctacttcggctacagcaccccctgggggtattttgacttcaacagattccactgccacttctcaccacgtgactggcagcgactcatcaacaacaactggggattccggcctaagcgactcaacttcaagctcttcaacattcaggtcaaagaggttacggacaacaatggagtcaagaccatcgccaataaccttaccagcacggtccaggtcttcacggactcagactatcagctcccgtacgtgctcgggtcggctcacgagggctgcctcccgccgttcccagcggacgttttcatgattcctcagtacgggtatctgacgcttaatgatggaagccaggccgtgggtcgttcgtccttttactgcctggaatatttcccgtcgcaaatgctaagaacgggtaacaacttccagttcagctacgagtttgagaacgtacctttccatagcagctacgctcacagccaaagcctggaccgactaatgaatccactcatcgaccaatacttgtactatctctctagaactattaacggttctggacagaatcaacaaacgctaaaattcagtgtggccggacccagcaacatggctgtccagggaagaaactacatacctggacccagctaccgacaacaacgtgtctcaaccactgtgactcaaaacaacaacagcgaatttgcttggcctggagcttcttcttgggctctcaatggacgtaatagcttgatgaatcctggacctgctatggccagccacaaagaaggagaggaccgtttctttcctttgtctggatctttaatttttggcaaacaaggtaccggcagagacaacgtggatgcggacaaagtcatgataaccaacgaagaagaaattaaaactactaacccggtagcaacggagtcctatggacaagtggccacaaaccaccagagtgctcaagtaaataccgtcagagaattcgctcaggcgcaaaccggttgggttcaaaaccaaggaatacttccgggtatggtttggcaggacagagatgtgtacctgcaaggacccatttgggccaaaattcctcacacggacggcaactttcacccttctccgctgatgggagggtttggaatgaagcacccgcctcctcagatcctcatcaaaaacacacctgtacctgcggatcctccaacggccttcaacaaggacaagctgaactctttcatcacccagtattctactggccaagtcagcgtggagatcgagtgggagctgcagaaggaaaacagcaagcgctggaacccggagatccagtacacttccaactattacaagtctaataatgttgaatttgctgttaatactgaaggtgtatatagtgaaccccgccccattggcaccagatacctgactcgtaatctg

SEQ ID NO: 251 - protein, 15 aa, synthetic construct
  REGION 1..15: note = Synthetic
GGGGGGGGGGGGGGG

SEQ ID NO: 252 - protein, 15 aa, synthetic construct
  REGION 1..15: note = Synthetic
GGGGSGGGGSGGGGS

1. A composition comprising a targeting moiety effective to increase transduction of central nervous system (CNS) tissues, optionally further comprising a cargo coupled to or otherwise associated with the targeting moiety.

2. The composition of claim 1, wherein the targeting moiety comprises a n-mer motif, the n-mer motif comprising or consisting of is Y₁-Y₂-Y₃-P-Y₄-E-Y₅ wherein Y₁-Y₅ are independently selected amino acids;
optionally wherein Y₁ or Y₂ is independently selected from an amino acid with a single positive charge, and Y₅ is an amino acid with a single aromatic ring; and
optionally wherein Y₁ is selected from I, T, Q, H, K, R, V, G, E, or L; Y₂ is selected from R, N, A, K, or G; Y₃ is selected from N, I, Q, M, F, L, D, T, R, V, or S; Y₄ is selected from Q, N, V, S, or T; and Y₅ is selected from F, Y, or H.

3.-4. (canceled)

5. The composition of claim 2, wherein the n-mer motif is selected from the group consisting of QRIPQEY (SEQ ID NO: 13), KNSPSEF (SEQ ID NO: 10), TRTPVEF (SEQ ID NO: 16), IRVPNEF (SEQ ID NO: 8), IRMPTEF (SEQ ID NO: 6), IRQPQEF (SEQ ID NO: 7), GKLPREF (SEQ ID NO: 4), LALPQEF (SEQ ID NO: 11), ELNPREF (SEQ ID NO: 3), HNFPNEF (SEQ ID NO: 5), TARPNEY (SEQ ID NO: 15), QNIPSEY (SEQ ID NO: 12), RSQPQEH (SEQ ID NO: 14), KGPGYEH (SEQ ID NO: 9), QSRDLYR (SEQ ID NO: 20), MNSTISK (SEQ ID NO: 19), VNTVREF (SEQ ID NO: 21), ENHTRDK (SEQ ID NO: 17), and GNDTRST (SEQ ID NO: 18).

6.-7. (canceled)

8. The composition of claim 2, wherein the n-mer motif is selected from Table 1 to Table 3 or SEQ ID: 3-21.

9. (canceled)

10. The composition of claim 1, wherein the targeting moiety is part of a viral capsid protein;
optionally wherein the viral capsid protein is an AAV viral capsid protein;
optionally the AAV viral capsid is selected from SEQ ID: 1, 22-40; and
optionally the targeting moiety is inserted between two amino acids of one or more capsid proteins such that the targeting moiety is external to the AAV viral capsid,
optionally wherein the capsid protein is VP1, VP2, VP3, or a combination thereof, and
optionally wherein the targeting moiety is inserted between amino acids 588 and 589 of a capsid protein of AAV9, or in an analogous position of a capsid protein from AAV1, AAV2, AAV3, AAV4, AAV5, AAV6, AAV7, AAV8, AAVrh8, AAV rh.74, or AAV rh. 10.

11.-16. (canceled)

17. The composition of claim 1, wherein the cargo is a polynucleotide, one or more polypeptides, a ribonucleoprotein complex;
optionally wherein the cargo is encoded on a rAAV artificial genome operably linked to regulatory sequence and flanked by AAV ITR sequences; and
optionally wherein the polynucleotide encodes one or more polypeptides and/or a RNAi oligonucleotide,
optionally wherein the one or more polypeptides comprise enzymes or antibodies, and
optionally wherein the polynucleotide encodes a CRISPR-Cas system.

18.-21. (canceled)

22. A vector system comprising one or more vectors encoding a targeting moiety effective to increase transduction of central nervous system tissues (CNS), optionally further comprising a cargo couple to or otherwise associated with the targeting moiety.

23. The vector system of claim 22, wherein the targeting moiety comprises a n-mer motif, the n-mer motif comprising or consisting of is Y₁-Y₂-Y₃-P-Y₄-E-Y₅ wherein Y₁-Y₅ are independently selected amino acids;
optionally wherein Y₁ or Y₂ is independently selected from an amino acid with a single positive charge, and Y₅ is an amino acid with a single aromatic ring; and
optionally wherein Y₁ is selected from I, T, Q, H, K, R, V, G, E, or L; Y₂ is selected from R, N, A, K, or G; Y₃ is selected from N, I, Q, M, F, L, D, T, R, V, or S; Y₄ is selected from Q, N, V, S, or T; and Y₅ is selected from F, Y, or H.

24.-25. (canceled)

26. The vector system of claim 23, wherein the n-mer motif is selected from the group consisting of QRIPQEY (SEQ ID NO: 13), KNSPSEF (SEQ ID NO: 10), TRTPVEF (SEQ ID NO: 16), IRVPNEF (SEQ ID NO: 8), IRMPTEF (SEQ ID NO: 6), IRQPQEF (SEQ ID NO: 7), GKLPREF (SEQ ID NO: 4), LALPQEF (SEQ ID NO: 11), ELNPREF (SEQ ID NO: 3), HNFPNEF (SEQ ID NO: 5), TARPNEY (SEQ ID NO: 15), QNIPSEY (SEQ ID NO: 12), RSQPQEH (SEQ ID NO: 14), and KGPGYEH (SEQ ID NO: 9), QSRDLYR (SEQ ID NO: 20), MNSTISK (SEQ ID NO: 19), VNTVREF (SEQ ID NO: 21), ENHTRDK (SEQ ID NO: 17), and GNDTRST (SEQ ID NO: 18).

27.-28. (canceled)

29. The vector system of claim 23, wherein the n-mer motif is selected from Table 1 to Table 3 or SEQ ID: 3-21.

30. (canceled)

31. The vector system of claim 22, wherein the targeting moiety is part of a viral capsid protein;
optionally wherein the viral capsid protein is an AAV viral capsid protein;
optionally the AAV viral capsid is selected from SEQ ID: 1, 22-40; and
optionally the targeting moiety is inserted between two amino acids of one or more capsid proteins such that the targeting moiety is external to the AAV viral capsid,
optionally wherein the capsid protein is VP1, VP2, VP3, or a combination thereof, and
optionally wherein the targeting moiety is inserted between amino acids 588 and 589 of a capsid protein of AAV9, or in an analogous position of a capsid protein from AAV1, AAV2, AAV3, AAV4, AAV5, AAV6, AAV7, AAV8, AAVrh8. AAV rh.74, or AAV rh. 10.

32.-37. (canceled)

38. The vector system of claim 22, wherein the cargo is a polynucleotide, one or more polypeptides, a ribonucleoprotein complex;
optionally wherein the cargo is encoded on a rAAV artificial genome operably linked to regulatory sequence and flanked by AAV ITR sequences; and
optionally wherein the polynucleotide encodes one or more polypeptides and/or a RNAi oligonucleotide,
optionally wherein the one or more polypeptides comprise enzymes or antibodies, and
optionally wherein the polynucleotide encodes a CRISPR-Cas system.

39.-43. (canceled)

44. A particle produced or a polypeptide encoded or produced by the vector system of claim 22.

45. (canceled)

46. A cell comprising the composition of claim 1.

47. A method of delivering one or more cargos to the CNS, comprising:
administering, in vivo or in vitro, the engineered AAV capsid of claim 10.

48. The method of claim 47, wherein the cargo is an RNAi oligonucleotide, a polynucleotide encoding a polypeptide, or a polypeptide, optionally wherein the polypeptide includes an enzyme or antibody;
optionally wherein the cargo is a Cas polypeptide, a guide molecule, or both;
optionally wherein the cargo is a nuclease or a nucleic acid component of a RNA-guided nuclease; and
optionally wherein the cargo is one or more polynucleotides encoding the nuclease and nucleic acid component of a RNA-guided nuclease.

49.-52. (canceled)

53. A cell comprising the vector of claim 22.

54. A cell comprising the polypeptide, or particle of claim 44.

55. A method of delivering one or more cargos to the CNS, comprising:
administering, in vivo or in vitro, or the vector of claim 22.

56. The method of claim 55, wherein the cargo is an RNAi oligonucleotide, a polynucleotide encoding a polypeptide, or a polypeptide, optionally wherein the polypeptide includes an enzyme or antibody;
optionally wherein the cargo is a Cas polypeptide, a guide molecule, or both;
optionally wherein the cargo is a nuclease or a nucleic acid component of a RNA-guided nuclease; and
optionally wherein the cargo is one or more polynucleotides encoding the nuclease and nucleic acid component of a RNA-guided nuclease.
